United States Patent Application Publication US 2022/0002667 A1 - sequence listing, part 2

SEQ ID NO: 1 - DNA, 4118210 bp, Bacillus subtilis (residues 2,059,106-4,118,210 of 4,118,210)
ggaatagctgttaaagacagtcttacttattatatttgtgctgcctattcattgtcaacttcagcagtgcttttatttcttacaaccataataggataacataccttaaccagtttagaaaccttatttttcatattcctttttttaacgcaaaaaaaaaagccgtgctcccccgaaaaaacgacatgtggataatttttttgcctttttttaatatccacagtcgttatcgacaacattttcacattgctaactcctgtggacaaagatttttcaacaagttgtcaggtttgtggataagattacgagaaccattgcaagtcctcgcttaatttgatattatatttgtgttttaactcttaattacttatccagcccattctctttatccacaaactgtggataagttgtggattgttttcacacagcttgtgtagattgttgtccacaacttgtggaatttgtcgaaaagctgtttttctactatactatatgttttcaacatttcgtgtgtacgaatggtcagagccatatgctctttttttgtgttctataacagggaaagggcgctgatttttaaagaaaaggagggctgtgccggataatggagaatatattagatctttggaatcaagctctagctcaaattgagaaaaagctaagcaaaccgagtttcgaaacttggatgaagtcgacgaaagcccattcgctgcaaggggataccttaaccatcaccgctcccaatgaatttgccagagactggctggagtccaggtacttacatctcattgcagataccatatacgaattaaccggggaagagttgagcgtcaaatttgtcattcctcaaaatcaggaggaagaaaactttttaccgaaaccgcaagtgaaaaaagcggcaaaagaggaaccgtctgattttccccaaagcatgctcaacccgaaatatacattcgacacattcgtcatcggatcgggaaaccgattcgcccatgcagcatcactggctgtggcggaagcacccgctaaagcgtacaaccctttatttatatacgggggagtcggcttaggaaaaacccacttaatgcacgcgatcggccattatgtcattgatcataatccttcagccaaagtggtgtacctgtcttctgaaaaattcacaaatgaattcatcaactcaatccgcgataataaagccgttgatttccgcaaccgctaccggaacgttgatgtacttttgatagatgatattcaatttttagccggaaaagaacaaacacaggaagagtttttccatacattcaacacgcttcatgaagaaagcaaacaaatcgtgatttccagcgacagaccgccgaaagagatcccgacccttgaagaccgcctgcgttcgcggttcgaatggggattgattacggatatcacaccgccggatctggaaacgcggattgccatcctgagaaaaaaagcgaaggcggaaggccttgatattccgaacgaggtcatgctttacatcgcgaatcagattgacagcaacatccgcgaactggaaggggcattaatccgggttgtcgcctattcatctttaatcaataaagacattaacgcagacctggctgcagaagcattgaaagatattattccgtcttctaagccgaaggtcattacgataaaagagattcagcggattgtcggacagcagttcaacattaagcttgaagatttcaaagcgaaaaagcgcacgaaatccgtggcgttcccaagacaaattgcgatgtatctttcaagagaaatgacggattcttctttgcctaaaatcggggaagaatttggcggcagagaccatacaaccgtcattcacgcccatgaaaagatttcaaaactgctgattgatgacgagcagcttcagcagcaggtgaaagaaataaaagaactgcttaaataatagtgccctcggatgaatcggggaaagtgtgaataactttttcatagccatacacagtctgtccacatgtggataggctgtgtttcctgtctttttcacaacttatccacaaatccacaggccctactattactactgctatttttaaaatatattaattatattatccgttaggaggataaacatgaaatttacgattcaaaaagatcggttagtcgaaagtgtacaagacgttctaaaagccgtttcatccagaaccacaattcccattctcaccggtattaagatcgtcgcctcagatgaaggagtatctttcacaggaagtgactctgatatttcaatcgagtcattcattccgaaagaagatgatgataaagaaatcgtgacgatcgatcagccgggaagtatcgtgctgcaagcgcgtttcttcagcgaaatcgttaaaaaacttccgatggcgactgttgaaatcgaagttcaaaatcaatatttaacgattatccgttccggaaaagccgaatttaatttaaacggccttgatgcagatgaatatccgcatctgccgcaaatcgaagagcatcacgccattcagattccgacggatcttttgaaaaacctgattcgccaaaccgtgttcgcggtgtccgcctcagaaacacgccctatcttgacaggtgtaaactggaaagtcgaaaacggtgaattattatgcactgccacggatagccaccgactcgctttaagaaaggcgaagcttgatattccggaagacagctcttataacgtggtcattcccgggaaaagcttaaccgagctgagcaaaattcttgatgacaaccaagaactggttgatatcgtcattacagaaacccaagttctgttcaaagcgaaaaacgtattgttcttctcaagattgcttgacggaaactatccggacacgaccagcttaattccgcaggaaagcaaaacggaaatcgtcgtgaacacgaaggaatttttacaggcgatagaccgtgcttctttattggcgagagaaggccgcaacaacgttgtaaagctttctgccaaaccggcggattcgctggagatttcatcaaattctccggaaatcgggaaagtggtcgaagctgttctggctgaccagattgacggcgaggaattaaatatttcattcagtccaaaatatatgatggacgcactgaaagtacttgaaggagcggacatccgtatcagttttacgggagcgatgagaccgtttcttatccgtacgccgaatgatgaaaccatcgttcagctcatccttccggtcagaacgtattaatcaaacagaatgtgctgccggcttagttcggcagcttttctattcatcagccgctccctcaagttttccctttccttatttcaggattttttagtacaattagatattagtgatatttgaaagaggtcgataatatggcaaatccgatttcgattgatacagaaatgattacgcttggccagtttttaaaattagccgatgtgattcagtccggcggcatggcgaagtggtttctgagcgagcatgaggtgactgtcaacaatgaacctgacaatcgccgcggcagaaagctttacgttggagacgtggtcgcgattgaaggatttggttcatttcaagtcgtcaattaaagcgggtgacagcggttgtatatccaaaatttagaattaacatcctaccgtaattatgagcgcgctgagcttcaattcgaaaacaaggtgaatgtgatcatcggggaaaatgcccaaggcaaaaccaatctgatggaagccatctatgtcctttcgatggcaaaatcacaccgcacctcaaatgacaaagaacttatacggtgggacgaagactatgctaaaatagaaggaagagtgatgaagcgaaacggggatatcccgatgcagcttgtcatctccaaaaaaggtaaaaagggcaaggtcaatcatatagagcagcaaaaactcagtcagtatgtcggggcgctgaacaccattatgtttgcccctgaggatttaaatctcgtcaaaggaagcccccaggtgaggaggagatttctcgatatggagatcgggcaggtttctgccgtttatctgtatgatttatctctttatcaaaaaatcctttcacagcggaatcattttctgaaacagctgcaaagccggaaacagactgaccggaccatgcttgacgttctcactgatcagctgattgaagcagccgcaaaagttgtcgccaaacgtctgcagtttacggcgcagcttgaaaaatgggcgcagccgatccattccggcatttcccggggacttgaagaactgacgcttaagtatcacacggcgcttgatgtatcagatcccaaagatttgtcgaaaataggtaacagctaccaggagtctttttcgaaattaaaagaaaaagaaatagaacgaggcgtcacattattcggaccgcatcgggatgatgtccttttttatgtgaacggacgcgatgtgcagacgtacggttcacagggacagcagcgtacgacggctttgtctttgaagctggccgaaatagatttgattcatgaagaaatcggagaataccccattttacttttggatgatgtactaagcgagctggatgattaccgacagtcccatttgcttcatacgatccaaggccgtgtgcagacatttgtcaccacgacaagcgtggatggcattgaccacgataccttacatcaagcaggaatgttccgtgtggaaaacggtacgttagtgaagtgaagaaatgaggtgagcgattgtatattcatttaggtgacgactttgtcgtttcaacacgcgatatcgtcggcatttttgactgcaaggtcaatgtatcgccgatcgttgaagaatttctggacagacagaaagaaaaagtagtgccgtccgtaaacggcacgccaaagtctatcgtagtcacgactgagaatatatattactctcccttatcttccggcacactgaagaaacgtgcgcaatttatgttagaaatagattcttagcggatctttacaatgaatatatcgtttaagaaaagtgtaggtgaatgtgcatggctatggaacagcagcaaaatagttatgatgagaatcagatacaggtattagaaggtttggaagctgttcgaaagagaccggggatgtacatcggatcaactaacagcaaaggccttcaccacttggtgtgggaaatcgtcgacaacagtattgacgaagccctggccggttattgtacagatattaacatcgagattgaaaaagataacagcattaccgttaaggacaacgggcgcggaattccggtcggtatccaggagaagatgggccgccctgcggttgaagtcatcatgaccgttctccacgccggcggtaaatttgacggaagcggatataaagtatccggcggtcttcacggtgtaggggcgtctgtcgtaaacgccttgtcgaccactcttgacgttacggttcatcgtgacggaaaaatccactatcaggcgtacgagcgcggtgtacctgtggccgatcttgaagtgatcggtgatactgataagaccggaacgattacgcacttcgttccggatccggaaatcttcaaagaaacaatcgtatacgactatgatctgctttcaaaccgtgtccgggaattggccttcctgacaaaaggcgtaaacatcacgattgaagacaaacgtgaaggacaagaacggaaaaacgagtaccactacgaaggcggaatcaaaagctatgttgagtacttaaaccgttccaaagaagtcgttcatgaagagccgatttatatcgaaggcgagaaagacggcataacggttgaagttgcattgcaatacaacgacagctatacaagcaatatttattctttcacgaataatatcaacacatacgaaggcgggacgcacgaagccggatttaaaaccggtctgacccgtgtcataaacgactatgcaagaagaaaagggattttcaaagaaaatgatccgaatttaagcggggatgatgtgagagaagggctgactgccattatttcaattaagcaccctgatccgcaattcgaagggcagacgaaaaccaagctcggcaactccgaagcgagaacgatcactgatacgctgttttcttctgcgctggaaacattccttcttgaaaatccggactcagcccgcaaaatcgttgaaaaaggtttaatggccgcaagagcgcggatggcagcgaaaaaagcgcgggaattgacccggcgcaaaagtgcgcttgagatttccaatctgccgggcaaactggcggactgttcttctaaagatccgagcatttccgagctgtatatcgtagagggtgactctgcgggcggatcagcgaaacagggacgggaccgtcatttccaagctattctgccgctgcgcggtaagattctgaacgttgagaaagccagacttgataagattctctcaaacaatgaggtcagatcaatgatcacggccctcggaacaggaatcggagaagattttaatcttgaaaaagcgcgttatcataaagtggtcatcatgacggatgccgatgttgacggcgcccacatcagaacgcttttattaacgttcttctacagatacatgcgggaaatcatcgaaaacggctatgtctacattgcccagccgccgctttataaagtgcagcagggaaaacgggtggaatacgcttataacgataagcagcttgatgagctgttaaaagagcttccgcaatcacctaagcccggcctccagcgttataaaggtcttggagaaatgaacgcgactcagctttgggaaacgacaatggaccctgcgaccagaacgcttctgcaagtcaatcttgaagatgcaatggacgctgacgagacttttgaaatgctgatgggtgacaaagtagaaccgcggagaaacttcatagaagcaaacgccagatacgtaaaaaatcttgatatttaaccaagaaagccttattttcgttaagaaataaggcttttttctcaaagcggcttctaaagcctctgaaaacccgcaaaacccgtatattctactaaattaatgtgtataaacacaagtttattgatataatggagaatagtgaaatcgtattgaagatcataatggacaatctactcccacattatttcatgtgatacttcagggaggtttttttaatgagtgaacaaaacacaccacaagtacgtgaagtcaatatcagtcaggaaatgcggacatccttcctggactatgcaatgagcgttatcgtatcccgggcgcttccggatgtgcgtgacggtctgaagccggttcacaggcggattttgtacgcgatgaatgatttaggcatgaccagtgacaaaccatataaaaaatctgcccgtatcgtcggtgaagttatcggtaagtaccacccgcacggtgactcagcggtttacgaatcaatggtcagaatggcgcaggattttaactaccgctacatgcttgttgacggacacggcaacttcggttcggttgacggcgactcagcggccgcgatgcgttacacagaagcgagaatgtcaaaaatcgcaatggaaatccttcgggacattacgaaagatacgattgattatcaagataactatgacggcgcagaaagagaacctgtcgtcatgccttcgagatttccgaatctgctcgtcaacggagctgccggtattgcggtcggaatggcgacaaatattcctccgcatcagcttggggaagtcattgaaggcgtacttgccgtaagtgagaatcctgagattacaaaccaggagctgatggaatacatcccgggcccggattttccgactgcaggtcagattttaggccggagcggcatccgtaaggcatatgaatccggacggggatccattacgatccgggctaaggctgaaatcgaagagacatcatcgggaaaagaaagaattattgtcacggaacttccttatcaggtgaacaaagcgagattaattgaaaaaatcgcagatcttgtccgggacaaaaaaatcgaaggaattaccgatctgcgtgacgaatccgaccgtaacggaatgagaatcgtcattgagatccgccgtgacgccaatgctcacgtcattttgaataacctgtacaaacaaacggccctgcagacgtctttcggaatcaacctgctggcgctcgttgacggacagccgaaggtactaagcctgaaacaatgtctggagcattatcttgatcaccaaaaggttgtgatccggcgcagaacggcttacgaactccgcaaagcggaagcgagagctcacattctggaaggtttaagaattgctctcgatcatttagatgccgttatttctcttatccgcaattcccagacggctgaaattgcgagaacaggtttgatcgaacaattctcactgactgaaaaacaagcgcaagccattctggatatgcgccttcagcgattaaccggtctggagcgcgaaaagattgaagaggaatatcaatcacttgttgcgcttatcgccgagctgaaagatattttagccaatgaagcaagagttcttgagatcatccgtgaagaacttaatgaaatcaaagagcgtttcaatgatgagagacgcactgaaatcgtgacgtccggtcttgaaacaattgaagatgaagatcttatcgagagagaaaatatcgtcatcacactgacccataacggctatgttaaacgtctcccggcgtccacataccgcagccaaaaacggggcggaaaaggcgtacagggaatgggaacgaatgaagatgactttgtggaacacttaatttccacatcaacgcacgatacgatcctgttcttctctaataaagggaaggtataccgttctaaaggatatgaaatccctgaatacggccgtacggcaaaaggcattccgattattaaccttctggaggttgaaaaaggcgaatggattaatgctattattccggtcagcacgtttgatgaggagcaatacctcttctttacgaccaaacaaggggtgtcgaaacgtacggcactgtcccagtttgcgaatatacggaataacgggctgatcgccctaggtctccgggaagacgatgaactgatggccgtccgcctgactgacggcaagaaacaaatcatcatcggaacgaagaacggtttgctgatccgtttccctgaagcagatgtaagacaaatgggacgcacagctgcgggtgttaaaggcatcacgctgacagacgatgatgtcgttgtaggcatggagattcttgaagaagactcccacgtcctcatagtgacagaaaacggctacggcaaacgcacgccggcttcagaatacagagttcaaagccggggcggaaaaggccttaaaacatgtaaaatcactgacagcaacggtccgttagtaaccgtgaaagcaacaaaaggcgaagaggacttaatgattattacggcaagcggcgtgttaatcagaatggatattaatgatatctccactacgggacgcgtaacacaaggcgtccgtctgatccgcatgtctgatcaagagcatgtagccactgtggcgcttgtggaaaagaatgaagaagagccggaagaaacggaagaagtataaacgtagaagcgcagctgtagcaggctgcgcttttactatataaagaaatgaaaaaaagctttgacacatagtgatgatgctgatataatcatttttgttgtctttttaatagaaaggcaagcctagcgaaaatattttttaaaaaagtattgacctagcaaactgaaaatgttatgattaagaggtcgcttcgagagaagcaacaaagttctttgaaaactaaacaagacaaaacgtacctgttaattcaaagttttaaataaatcgcacagcgatgtgcgtagtcagtcaaactactttatcggagagtttgatcctggctcaggacgaacgctggcggcgtgcctaatacatgcaagtcgagcggacagatgggagcttgctccctgatgttagcggcggacgggtgagtaacacgtgggtaacctgcctgtaagactgggataactccgggaaaccggggctaataccggatggttgtctgaaccgcatggttcagacataaaaggtggcttcggctaccacttacagatggacccgcggcgcattagctagttggtgaggtaacggctcaccaaggcgacgatgcgtagccgacctgagagggtgatcggccacactgggactgagacacggcccagactcctacgggaggcagcagtagggaatcttccgcaatggacgaaagtctgacggagcaacgccgcgtgagtgatgaaggttttcggatcgtaaagctctgttgttagggaagaacaagtgccgttcaaatagggcggcaccttgacggtacctaaccagaaagccacggctaactacgtgccagcagccgcggtaatacgtaggtggcaagcgttgtccggaattgtgagacagttcggtccctatccgtcgcgggcgcaggaaatttgagaggagctgtccttagtacgagaggaccgggatggacgcaccgctggtgtaccagttgttctgccaagggcatcgctgggtagctatgtgcggacgggataagtgctgaaagcatctaagcatgaagcccccctcaagatgagatttcccattccgcaaggaagtaagatccctgaaagatgatcaggttgataggtctgaggtggaagtgtggcgacacatggagctgacagatactaatcgatcgaggacttaaccaatttgaatgtatgcttactgttatctagttttgagagaacactctcaatggtttggtggcgatagcgaagaggtcacacccgttcccatgccgaacacggaagttaagctcttcagcgccgatggtagtcgggggtttccccctgtgagagtaggacgccgccaagccattacacgcaagtgtaatatatggaggattagctcagctgggagagcatctgccttacaagcagagggtcggcggttcgagcccgtcatcctccaccattcctatcatacataagttggcgtattaagccggtgtagctcaattggtagagcaactgacttgtaatcagtaggttgggggttcaagtcctcttgccggcaccacctttatatgttatactatataagtctcttgtaataagagccattagctcagttggtagagcatctgacttttaatcagagggtcgaaggttcgagtccttcatggctcaccatgtttttcttgcggatgtggcggaattggcagacgcgctagaatcaggctctagtgtctttacagacgtgggggttcaagtcccttcatccgcattgccaaacgcggaagtagttcagtggtagaacatcaccttgccaaggtgggggtcgcgggttcgaatcccgtcttccgctccaactatactataccatccatgccggggtggtggaattggcagacacacaggacttaaaatcctgcggtaggtgactaccgtgccggttcaagtccggccctcggcacttattgttgcgcccgtagctcaattggatagagcgtttgactacggatcaaaaggttaggggttcgactcctctcgggcgcgccatacatacttttgaaaaacgggaagtagctcagcttggtagagcacatggtttgggaccatggggtcgcaggttcgaatcctgtcttcccgaccattttggggccttagctcagctgggagagcgcctgctttgcacgcaggaggtcagcggttcgatcccgctaggctccacttgattttaattgttttttggcggtgtagctcagctggctagagcgtacggttcatacccgtgaggtcgggggttcgatcccctccgccgctaccattggacctttagctcagttggttagagcagacggctcataaccgtccggtcgtaggttcgagtcctacaaggtccaccacttatacggaggaatacccaagtctggctgaagggatcggtcttgaaaaccgacaggggtgtcaaagcccgcgggggttcgaatccctcttcctccgccatatctaatttaattatcatcgcggggtggagcagttcggtagctcgtcgggctcataacccgaaggtcgcaggttcaaatcctgcccccgcaaccaaaaaaatggtccggtagttcagttggttagaatgcctgcctgtcacgcaggaggtcgcgggttcgagtcccgtccggaccgccatttataaaaaggctcggtagctcagttggtagagcaacggactgaaaatccgtgtgtcggcggttcgattccgtcccgagccaccatttaatttaatattgttttggcggttgtggcgaagtggttaacgcaccagattgtggctctggcactcgtgggttcgattcccatcaatcgccccaaacaacatgcgggtgtagtttagtggtaaaacctcagccttccaagctgatgtcgtgggttcgattcccatcacccgctccatttttatattgtcatgggcctgtagctcagctggttagagcgcacgcctgataagcgtgaggtcggtggttcgagtccactcaggcccaccatgatgatttttccacagtagctcagtggtagagctatcggctgttaaccgatcggtcgcaggttcgaatcctgcctgtggagccatacggagaagtactcaagtggctgaagaggcgcccctgctaagggtgtaggtcgtgtaagcggcgcgagggttcaaatccctccttctccgccataaggcccgttggtcaagcggttaagacaccgccctttcacggcggtaacacgggttcgaatcccgtacgggtcattaaaaaaccttgcataatatgcaaggttttttattatgcgttcatagtgtaaatggtaaaagacaggtatgtggcaaaagcgctccataataaataagggaccagaagccaggctgaagctttactgtatttaccggcaatgagcaacagaatgagtgttgtcaccgccacaagcaggcaatcgatagatgcagcaagcaaatttttctgtgtgaattgaaaatagctgaatccttgattcacgatataattgatgagaagcatcacccaaaaagctttggattctttacatgaaaactttgcgtatatcaaggctgctgagagcgaaataagcgcaaacaaaaccgcccatatgatgccgatcactgatccgctcggcgtccagtcaggtttttgcagtgcgtcataccattcactgtcgatgggaaagagaacccccgctaaagaaaacaagacatatgtaatgataaatacaataatcgcaccgatatacttctttttcatttgttccctccgtcattcaatgtcaatacgttagttcccttttttggaaatattaaaccttttaaaaggttcatgcatcattaagtgtatgagttttcagtgtaaaaatgcagcaaaccatttatttgtattcaaaaaccccggcaggccggggttttaatcagcatgaagatcgccaaaggtcgtcataattccttcttcgtccagttcctgttcatatttttcgtgtgctttgcttggatacacggaaatgttttttccggtaatatctgtcgcgataaagttttcataatcctcagcatagccgatgttttcttctgagttcattgtcatatccccatagctgagcggaggatcctctaaatcctgaggcgtttctgagtttccgtattcctcaacatcctgataagcatcttcactatcgtaagtcgcccggattgattcatcatcatcaaattcaaactgtccgaacggtgtttcctcctcaatcggcctgtctttggaaacggcatcctgcgaggaatattccgccaatgtcgtagccgtcggcagagcttcgagtctgtcataaggaatgtccttgccgctgacttcacatgtgccgtatgtgccgttttcaatttgtttcagagagtaatcaatgtcgcgaaggtgctcccgttcatggtcgagcaaagccaggtctttttcccgctcgtataattcggtcgcctgatcgccgggatgattgtcataggaagacaattcgccggatgactgatacgggaattcatcagctaactgaaattgatcattttctttaaagcggcttaaaatatcatgtctggcttcttccaattctttttttaagtgtgtgatctgttcgtttgtaagcacatcaatccctcgtttctatgtgatgcttactgttagtatgaacgcttttgcgcagaaaaatggtggataaaaatagtcattttcccatgaggaagtaaaaggatacagtgattgccgagagtggggaaagaaaattcaagtttgtttctttattcatttgcgcaaaaaggtttataataagaaatgcaggcattttgtcgtgctcacatctgtgtgtttgacacaaagtcatcacaggtgtattgtattaaaagcatttaacggattatggaggaatgtctcatggtgacaacggtgcagcatacgttccgagaggaagcagatcatgcattacataaagccaaacaagtcaaccatgctgtcttactgagctattcaagacgtattgcgtctttagaccctctatcatttttcaaagacggagcaaaaaaatataaaggcaaacgatttttttggtcagaacccggtagtgaattaacaatagtcggtcttggcacagaagcgctgttccaatcgaatgaaaaaaatggaaagcgttatcacgacgtttttgaacaatgggagcgctttaaaaagacggcttttcatattcatgaagaagaagaggcggcgcataccgcggtcggccctgtcttattcggcggtttttcatttaatcccgctgaagagagaggagacgaatggaacgggttcgaagaaggactgttctttatcccctcactcatgctgacaaagacggcagatggtgattatttaaccgtcaatcaatgggcggcagacggtaatcaggcagaagatacgctgaaacgtctgaaatctttttcggaagctttttcagtttcttcaatcgagtatgaagaatatcctgttttaacaaaagcggaagaacttgatgtggaaaactggcttgaagccattaaaacagcaacaaatgatatgaaagcaaatcaatatgataaagtcgtgctggcaagggaagtcgttttgtcatatgatgggcctattccggcggagagcgttgtccgcaagcttttgacggaccaaacgacaagctatgtttttgcgattgagcagggagataaatgctttgtcggcgcttcaccggaacggctgatcaaaaaatccggcaaagacgtcatgtccacctgtctggcaggttcaattaagcgcggagaaaatcaacaagaagatgagcgtctcggcaaagagctgctgcatgacgaaaaaaatctcgcggaacatgattttgtggttaagatgatacacgattctttcttgtcgagctgcagcgatgtgaaaaagcctgcaggtccgcaattatataaaacaaaaagtgttcagcatctatatacgccgatcacaggccatcttaaaacgtccgcttcgctgtttgatttaattgaaaagctgcatcccacaccggcattgggcggagctccccagcagaaagctgttgagattatcgctgatattgaaccgatgacacgcggatggtacgcggcaccgatcggctggatggacggcagggaaaacggagaatttgtcgtggctatccgatcagggctgattgaaggcaaaagtgcgcggcttttcgcaggctgcggcattgttgaagattcagatccgcaatcagaatatgaagaaacacaaattaaactaaagccgatgatctctgctttaggaggtgaaaggctttgacaaacccgattacacattatatcggaagctttattgatgaattcgctttatcgggtgtcaccgacgcagttgtttgcccggggtcgaggtcaactcccttggcggttttggcggcggcccacccggatattcaagtccatatacagattgatgaacgatccgcaggttttttcgcactcggtcttgcaaaagcccgccagcgtccggtcatgctgatttgtacgtcaggaacggcggcggctaacttctatccggccgtgattgaagctcattattcaagagtgcctcttattgtcctgactgctgaccggcctcatgaattgagggaagtgggggcgcctcaggcgattaaccagcattttctgttcggtaactttgttaagtttttcacagactcggctctgcctgaggaaaatcctcaaatgctgagctatatcagaacattggccggcagagccgtaagtgaagccgggaagcgcccgatggggccagtccatatcaatgtgccgctcagagagcctttgatgccggatttatcagccgcaccttttgaaagaatgagaaaggggcggcacgtctcagtcacaacagggattcagtcagctgatcaagattctctctgtcatattacagagcgtcttgcggggaccgaaagaggtatgatcgtctgcggcgaaattcacggtgaagcagaaaagcagcaaatcatcgcgcttgccgagatgcttcagttcccgattttggctgatccgctttcaaacctccgaaacggggagcatgataagacgctgattattgatgcttatgactcgtttttaaaagatgaagaaataaaagaggcgctgcgtccggacgctgtgatccgcttcggcccgatgccggtttccaaaccgctctttttatggctcagagatgatcctgccattgagcagtttatcgtcgatgaagacggaggatggagagatcccacccaggccggcgcgcatatgattcattgccatccgtctgtgtttttggaagcggtccgttcagctgaaaccggaaagcggccgtccggatggtttgagaaatggcagtttgtcaatgaccggttccggagtcatttacaggacgcaagcatggatgatttatcatttgaaggaaatgtatatcgtcagcttcagcaccttgtccctgaaggcagttcgatttttgtcggaaacagcatgccgattcgcgacgtggatacgttctttgaaaaacaagatcgctccttccgtgtttatgccaaccgcggcgctaacggaattgacggagttgtctcctcggctatgggactgtgtgagggtacaaaagctcctgtcacgcttgtcattggagatttatcgttttaccatgatttaaacgggctgttagcggctaaaaaacttggaattccgcttacggttattttaataaacaatgatggcggcgggattttctcgtttttgccgcaggcatctgataagactcattttgaagaactgttcggtacgccgacgggtcttgatttccggcatgccgccgcactgtacggcgggacgtatacttgccctgagacatgggaggcatttaaggatgcgtatcagccgcaggcggacaagcccggacttcatataatcgagctgaaaacagatcggacatcaagagttcaattccatcgcgatctgctgcaggccgcagtgcgggaagtgaaaaaagaatggaaactgtaacagttaaaacggccgacggcgtatgctatcgtgctgctgatagcggacacgaatcatctgaagctattgtttgtctgcatggatttacgggcagcaaagaatcatggatgtttttacgcggcatgtttcccggcgaacgaatggtgatgattgactgcctgggtcacggggagacagacgcgcctgtgcaagcggcaaggtacagtgcgagccggcaggttgcggaccttgccgccgtttttgatcaattaaaacttcacaaagtgaaacttattggttattctatggggggaagacttgcgtattcctttgcacaggcatttccgcatcgggtgtcagcgcttgttttggaaagtacaaccccgggcctcagcacgcttcaggaacgcaaaaagcggattcagtcagaccggaagcttgctgactttatattgcgggaaggtataacatcgtttgtcgattattgggagggcattccgttgtttgccacgcagctttctctgccggacagcgtaaaggcgtccatccgtgccggcaggctgaaaaataatccgtccggacttgcaggcagcctgctcggaatggggacgggctcacagccttcctggtgggaggcattacaccgcatcaaagcgcccgtcctgctcatatgcggtgaatgggatgaaaagttttgcgctattaatcaaaaggtgcataacctgctcccatcaagtaaaatagaggttgtcaaacaggcggggcacacggtacatgtggaacagccgcgaatttttggtaagatagtaagtgagtttttatacggcttgtaaagcataaagaaaatagcttttcggccggactcaggcaaaaatgaaggaggtcatatcaatggctgcagaatggaaaagtgaacgtcagtacgatgaaatcctgtacgagacgtataacggtattgcaaaaataacaattaaccgcccggaggtacataacgcatttacccctaagacggtatcagaaatgattgacgcgtttgctcgtgcgcgtgatgactccaatattggtgtcatcgttcttgcgggagcgggagataaagcattctgttcaggcggagaccaaaaagtccgcggtcacggcggatatgtcggagacgatcagatcccgcgtctgaatgtgcttgatcttcagcgtttgatccgcgtgattcctaaaccggtcgtagcgatggtatcaggctatgccatcggcggaggccatgtgcttcatatcgtctgtgatttaacgattgcggccgataacgcgattttcggccaaaccggaccgaaagtgggaagctttgatgccggttacggctcaggttacctggcgcgtatcgtcggacataagaaagcccgtgaaatctggtacctgtgccgtcaatacaacgcgcaggaagcgctcgacatggggcttgtcaatacagttgtcccattagagaaacttgaagaggaaacaattaaatggtgtgaagaaatgcttgagaaaagccctacagcccttcgtttccttaaagcggcatttaatgcagatacagacggcctcgccggaattcagcaatttgcaggagatgcaacgcttctttattacacgactgacgaagcgaaagaaggccgcgattcctttaaagagaaacgcagtcccgatttcggtcagttccctcgttttccgtgatcagatgacactacgaaacagcttgagccgctctggtccaagctgttttcttttcaaaaacagtacttttacctcggagatgataacatgctgacagaacagccgaattggctcattcaaagggctcagctgacaccagagagaattgctctcatatttgaaaacaaacagatgacattcagagaattatatcatgcttctaaacaaatggccgcgcggctgtataaatactgctcgcttaaaaaaggagaccgcgctgcgattttgctttctaacagaccggaaatggtttatgccgttcacgcctgcttcttattaggggcggaagctgtgctgttgaatacgaagctctcaaaacaggaacggttgtttcagctcgaagattcacaggcaaagcttttattgacggaggacggtttttgccgcgaagaatatgaatctgcggtcgccgctgcagatgtggacgagctgcaggctgaagaggcgggagacattgaacctgaagcttatgtaacgcttgatgatacggcgactcttatgtatacgtcaggaacaacgggaaggccgaagggggtgcagcagactttcggtaatcattattccagcgctgtatcgtctgcgctgaatctgggggtcacggagcgggaccgctggcttattgcgctgccgctgtttcatatcagcggtctgtctgcgctgtttaagtcggtcatttacggcatgcctgtcgtgcttcatcaaaaattttctgtcactgatgtgctggacagcatcagctcccatcaggtcacgatcatttcagcggtgcagaccatgctttcgggcctgcttgcggaaactgaacaatgtcctgaatcactgcgctgcattctgcttggcgggggtccggcaccgctgccgctccttgaagaatgccgcaggaaacaatttccggtattccaatcttacggcttgactgaaacctgctcacagattgtcacgctttctccggaattcagtatggacaagctcggctcggccggtaaaccgctgttttcatgcgaaattagaattgaaaaagacggaaacccttgtgcgccgtttgaacacggtgaaattacggtgaaaggcccgaatgtaatgaaagggtattaccatcgtgacgacgcaaaccaggccgcttttcataatggatggtttaaaacgggcgatcttggctatttggatgatgaagggtttttatacgtgctggacaggcggtcggacctcattatttcaggcggagaaaacatctacccggcagaagtggaagcggcgctgcttgcccatccggctgtagcagaggccggtgtttcgggagccgaagatccgaagtgggggaaagtgccgcatgcttttctcgtgctgacttcttctgtcagttctgaggagctgaccgccttttgccgtgagcggcttgcaaaatataaaataccggctgcttttttcgaggttgacgggctcccgcggaacgcgtccaataaactgatgaggcatcggctgaatgagcttcgtaaaggagaattatcatgattaagattgaaaaaatcaccctttatcatgtaagtatgaggctgaaaaaaccgtttaaaacaagtattgaaacgctgcaggatcgtaaatttttgatcgtggaagcgatcgatgaaaccgggagaaccggctggggggaggtatcggcgttttcttctccgtggtatacagaagaaacgattcagacatgcgcgcatatgctgagagattttttcatcccaaatgtcgtaggccgcgagtttttccatccgtcagaagtgcctgacagtctcgcgcgtttcaaaggaaaccgcatggcaaaagcggggctggaatcagccgcgtgggatctatatgccaagaaaaaggggatatctctcgcagaagccttagggggcaaaagagataaagtgcccgccggcgtggcggtgggtctggcttcggctgatgagatgcttcgggaaattgagcaatacgtaaaagaaggttatcaacgtataaaaataaaaattcagcccggccatgacgttgatctggtcagagccatccgcagccgttttccgaacgtaccgctgatggcggatgccaactcggcatatgaactgaaagacatcagcaggctgaaagagttggatgaattccagctcttgatgatagaacagccgcttcaagcagatgatattgtcgatcaccgccacctgcagaaacacttgagaaccgcggtatgccttgatgaaagcatatgctcatatgatgacgcaaggcgggcgattgagcttgggagctgtaaaatcattaacataaaaccagcgcgtgtaggaggcctgacagaggctttaaaaatacatgacttatgcagagagcatcacatgccggtttggtgcggcggaatgtttgaaaccggcatttcgagagcgcagacagtcgcgctcgcttcgctgccgcaatttacgataccgggtgatatttcctcatcagaccgatactgggaggaggatattgtcactcccgacatacgtatcgaagagggattcatctctgttccggacggtcccggactgggtgttgaagtcaatcaggaaataatgagaaaatacgtcacccaaatggacgtttttacgacaaacaactgataaaaagacatttcagcgagttgagctgcctgtatgctgctgttatattgaaattgttcatcatcaccccttcccccgtttgaaccggctgtatcagccggtttttttaataggcgaatgcgatgatttttttattcttcaaacagtgtcggctttacatcgcaggtgttgctttctggctggggcaaagatgtacatcttgataaaaaattctgtgcttgtcatgaatgcgatactgatcgtaccgtctgccgcctatatttgccgacgaaccgcctttctgccatgcttctcatccgcgcgattttctccggctcaggggctgatttcaaaaaggcttgcggcgcggaaatgaaaaagagctgtataaaacagctcttttcttttataaatcatgcggtttaaaggttttgcaatccgtttcttcacttttttcagcggtttcgcctgtatggctgactacataaatagcgtcggccgtgcatttgtttcctctgccccaatatgaacagttattgacttcacacagaattttttggtccatgctggctcccctccaagataaaaggtacgccattagtatgagccgccctgatttttgttattcctcctggcggatataacgtctgtctttcataaagagcttccagaagaaataaaacccgggaaacaaaataatgaaagcgacgatatacgtcataaacagcgccctgaaggtggccggctccgtaaatcctgacatgaccgtaatatccggataaatcatataaggaagatgcgcccgtccgtatgcatagcttgccagaaagtattgaagcgcaatggcgatcatggcgattctcggtttgccgaggttgcggccgaagcgcttattcggcaaaaacagagccacgccggcaatgataaatgtaatgacagacagaatgagccatgtcttgtctttcatcatccccgtatacagccagccggcttcagagcgtaatgtcagcataatgaagaaggcaaaaagaagcgacagcggccctgttagtaaagagctccgtctgtagatgcggtacgcatgctcctcttccgcaacatttgaaaaatcggccagaagcagtgaagataaaaataaagtgcttaaaatggcaaagccgataaacgcatacgcattaaggcttgtaaagacatttgccaaattcaggtgatacacgccgcccgtcttctcaataaatcctccgtgtgtgaccggaaggaccaaaatcagcacagcgggaataatgaagcccgaaattccggagatatatctcatgatttttctttccttcgccgtattggagaaaacgagaaagccgctgcggatggctaaaagcagcaaaataatactccccgggatcaataaaacggttcccagcacgaaggttgcccctggaaagaagctgaatagggcgacaacgattgcgacgataaagacgttggtcacttcccatgtcggggacaaataacggttggcgatgtttgtcgcctttgtttgttctttatttaaataaatcatcgaccaaaagccggctccgaagtccatcgttgccatgaccgcgtagataaacacgaagccccatacgattgatatcgcaatgagagcatccatggtaatgtccattttaattcagccctttctatagttaggattccgccgcttttacatcctcctcaacgggatgtttgcggaaataataaagcagcacataaatgactgcagctgccaaaatggcgtaaacgaccgtaaacaggatgaacagcaaaccgattgaaccggttgtcgtgacgacatcagacgttttcaagagatggtaaatcacccatggctgccgccccgtacaagcgaatatccacccgaattcaattccgatcagactgagcggtcctgcggttaaaaataaaatcaaaagccaagtcggaaagctgtctttctttaaaatttttctccacacgatgccgatgattgagtacaaaatgagcagcatcccgatgccgaccattccgttaaacagtgtatggatgaataaaggcggccactcgtctttcggaaacgcgttcaatcctttgacgacggtatcaaagctgtttgcagccaaaaagcttaaagcccacggcacttctatcgcccattttactttttcttcttttgcatcagtaaaacccccgatcgcaagcggagcgtgtgatctagtttcaaacagcccttctgcgcccgcaagcttctcaggctggtattcgtaaagaagctgggctgactcgtgaccgtttaaagaggcaataatggagaatatcccgccgatcgttaaggcgagcagcagcgcttttcggtgaaagcggtatacctgctcctgttttctcgttctcagcattttataagccgcaactgacgcaacgataaatgccccggtcatgaaagccgtcagaacgacatggcccgcggtggtgaaaaagcttggattaaaaaacgctgcccacggttcgacgtcagtgattttgccgtttaaaattttaaagccggccggcgttccttcaaatgcgtgaacatttgtgattaagacggcggatgccgcggcgccgatcaaaacgaaaattacggcaatgatgcgcatcgccggagtcagccggtcagcggcgtagacataaatggacataaacagcgcttcgataaagaatgcataaatttcaatctgaaacgggagtgacatcaccctgccgatgacttccatgaatccgggccacaaaagggcaagctgtgtacccgcgatcgttccggtcggtatcgccacgccgagcagaacagcctgcgccttcgtccaccgttttgccataatggcataatgcggatcttttgttttttggtaaatcaattcagccattaaaatcatcagaggcaagccgacaccaagcgtcgcaaaaataatatgaaagcccatggttgtaccgaacagacttctggctaatactaaatcatccacgatcataaaccgcctttctaaattaccgttttatgtaatgtggttatattatttgctgaagcgattagattattcttccgattccatatatgtgcagggtttagaaatcaggggatcagggcatatatgattgacaagcggatatttaaggtttaaaataaaacgtaattattacgatttgagaaagggagatcagcatgaaaaaagatattcatccggataaccatcaagtgatttttcaagatgtgaacagcggctatcgctttttaagccattctacgaaaaaatcagaggaaacagcagagtgggaagacggaaagacatacccgctgattaaagtagaggtcagctcagatacgcatccgttttatacaggccgccaaaaattcaacgaaaaaggcgggagagtcgaacagttcaacaaaaaatacaatatggggaaataagacaagcccaatggggtttgtcttatttattgagcactttgtcatctcgtgcggggagtgacgaaatgacccgtcttatgttatattgtgaataaaaaagcagaaaggaaacaccaagatgagtcttctaaacgatatcatgcaatttaatgagcagttcactaaaaacaaagattatgaaaaataccaaacatctaaattcccggataaaaaaatggcgattttgtcctgtatggacacacgtcttgtagaattgcttccgcatgcgatgaacatgcgaaacggcgatgtgaaaattattaaaagtgccggcgcgcttgtcgcccacccgttcggaagtatcatgcgcagccttttagtggccgtatacgaattaaacgccgatgaagtctgcgttatcggccaccatgattgcggcatgagcaaaatcaacagcgaggatatgctcgataaaattatcgaccgcggtattccgaaagagcggattgacatgctgaagcactcaggagttgatcttgatcaatggctgaaaagctttgattcagtagaagcgagtgttacagacagcgtaaacgtcattaaacaccatccgctattccctgacaatgtgccggtgcacggtctggtgattgatcctgaaaccggtaaacttgatctggtgatcgacggctaccggcatatggactaatgtttttgttttttgtccggtacgggatcaacaccgcccggatgaaaagggtggcactttaaaatccgcttcagtgtcagccatccgccttttaatgcgccgtgagtcttgacggcttcgattccgtactgcgaacaggtcggataaaagcggcatgacggcggcgtcagcggagagatgaacttctggtatccgcggattaaagcaatcattatggttttcatcaaaaaaccgcctttctgatgctagtatagaaaaaaaatttcagattgaaaagcttccgccacaattcttatcggaaaactgtgttataatggatgcatattctgaaaaaaagggagtgccattatgccttcagtagaaagttttgagcttgaccataatgcggttgtggctccgtatgtaagacattgcggagtgcataaagtcggaacagacggcgtcgtgaataagtttgacattcgcttctgccagccgaacaaacaggcgatgaagccggatacgattcatacgcttgagcacttgcttgcgtttacgattcgcacacattctgagaaatacgatcacttcgacatcatagatatctcaccgatgggctgccagacaggctattatcttgttgtcagcggcgagccgacagcggaagaaattgtagacctgcttgacgctacgctgaaagaagccatcgatattacggagattccggcggccaacgaaaaacagtgcggccaggcgaaacttcatgatttagaaggcgcgaaacgtctgatgcgtttctggctgtcacaggataaagaagatttgctgaaagtgttcggataaaaaacaggcctttttgctgacatgcaaaaaggcttttttacatatttctaaaaaatgtcacaccttatgtgtaagcgtttgctaaaatagaagcaaacatgaaggagtgatgggatgaaacgggctgtattggcaggtatgtgcggtatggtatttctattatcttcctgcgggggcaattcggataaaacctccgcggatgaagagcctaaagcgcttgaggtcaagcttacaggaccggaaacggcagcaccgcatgaaaaaacggaatacaaggcggaggttttttacggcggcaagcgtgtcacggatgcggatgaagtcatgtttgaagtatggaaagaaggaaaaaaaggcagcagcaaaacaagcaaggccaaggaggaaaaaggggcgtatcacctgcggactgaatttgatgaagagggtgtgtataccgttcaatcccacgtaacggcaaatcagcagcataatatgccgactgtaaaagtgcgtgtcggggatgctgaagctgccgatgattcctccggctatgaggaacagacgcatcatcattaaggattttttttatccgtcaagccttttgatgcgtcctccggcgggtcaatcgtatgttttacattataagctcttacagtcgaccagatggataaaagcagcacggcgagcacgataagaaagccgaagctcagaagaagcaccatgaaatccctcctttttaacaaatcataacatattttccatccgtaaaaccaagggctaaaaatttatgttttaacacacgatatatagggtatatcaatagtaaaccaaaggaggaagataggcatgtcagaaaaactattggacgcagtcaataagcaagttgcaaactggacggtcatgtatgtgaaattacataactatcattggtatgtcaaagggaaggactttttcacattgcatgaaaagttcgaggagctgtataacgaaacggctacatatattgatgatctggcagaacgtctgctggcattaaacggcaagccgatcggcacaatgacggaatcattgaagacagcgtctgtaaaagaagcggaaggcaatgagagcgcagaacaaatggtacagaacatttatgatgatttcactgtcattgcggaagagctgaaaagcggcatggatctcgcagatgaggtaggagacgaaacgaccggtgatatgctgcttgccattcaccagaatatcgaaaaacataactggatgctgaaagcgtatttgggataatcaacaagggaggaccggggctataaagcactcggtcttttatttggctgccgaagagaggtgttgtccatttttctgaaaaatccagtccgttccattcacttttcatagaataatgtaaggccgtttctgtgaaaggatgttggatcaagtgggcaaagactttggcatcttttcgttttttgcagtgatcgtgtcggcagcggggtttttcttcggaggttttcagtattcgtttctgattttgctatcggtcatggcgattgagtttatcagtacaagcttaaaagaatctcttttgcagcagctgagcgcaagaaagctttttgcgcggctggtcaaaaaaatcgtgaccctggcattagtctcagtttgccatttttttgaccagctgcttcataccgaaggcgccatccgtaatttggctatcatgttttatatcttatacgaatcggttcagatcgtgattacggcaagctcgctgggcataccggttccgcaggtgcttgtcgacctattggatactttgaaaaataaattcaagcgcaaaccgtaacatttgcttcaaaggaggctatactagcgggtatgatggttttcctctgaatttttgataaagggcttccgaacaaacgcaactgtggtatgatgtatggaagatatgaaggaacggattagagggataaacatgtacgagtttaaagactattatcagaacactgttcagctctcctttgaacaccagcctttttcagacagcccgaagcacgtgtgggtcatatgccgatatggagataagtggcttttgactgagcacgaagaccgggggtttgaatttccgggcggaaaagtggagccgatggaatgtgcggaggaagcggccctgcgcgaggtgaaagaagaaaccggtgccgcggtaagacatctgaagtacgttggacagtataaagttctcggcagggaaaaggtaatcgtgaagaatatttattttgccgatattgaaaagcttgaaaaacaggctgactattttgaaacaaaggggccggtgctgttcagcgaactgccggagaatctcccgcgaaataaaaaattcagtttcattatgaaagattcggtgcttccgatcagtctgaaaaagctgaaagaggacggcgtatttcaatcataaaaaacggagacccggcgtttacgcacgggtcttttttaaatttttcctttcgtccattttctttctaacagttcgactccctgatacatcaatgtcgcaaaaattgcgatgatcagaaggcttaagaacacaagagtgaaattgaagacctggaatccgtaaatgatcatgtagcccagacctttttcggaaacgagaaactcgccgacgatgacaccgacccaggataaaccgacgttcactttaagcgcggaaataatcgcgggggcgcacgccggcagaatgacttctttaaacatgatgcttcttttcgctccgaaggttttcatcaccttaatatagttttcatccacttcctgaaaagccgtaaagacgacgattgtcgtgataatgacactgatgactgctcccatggcgacaatgcttgtgaaattcggtccgagtgccacgatgagaatcggtccgagtgcgaccttcggcatcgcgtttaaaatgacgaggtacgggtctaaaacccgggcgagcctgtttgaccaccataacagagcggcgaggcatgtgccgaggagcgtgccgagcaaaaagccgagaacggtttctcctaaggttacgccgatgtgcgccgcaagggatccgtccgcaatcttttcaactaaaagcctgcaaacggcggagggtgagctgaagattaacggatcgatccagcccgccctgctcgatatttcccatccggcaaaaaatacgataaaaatggcggcctgatacgcacggatccggagcttttctttttggtgtcttttcttaaactgctgatgaagctgttcaatcgtgccgctgctgtttttcaagggaattcagctccttccatatggtttgaaacagcggctgaaaggccggatcctgacgcgcgtcaaacggatctaaagccgcgagctccttaggcacggtgaatatttggtggatggtgcccggctgattcgaaaataaatagatcgtatcgctcatggcgatggcttcaccgatatcgtgggtgacgagcacggcggttttttgaaaatcctttaatgttctgaagacaaggttttccaaagaaagcttcgtttgaaagtccagcgcggaaaacggttcatcaaggagcagcagtcccgggtccggtgcaagagttctgacaagtgccgcccgctgccgcatcccgcctgacagctctttcgggtatttcttttcaacgccgattaatccgagcttaggcagaaggctgagaacttcagctcttttttcttctgttaatgtttttgaaatgtgtaaaccgagcagcacgttttcctcaattgatttccaaggaaataaataatcctgctgaagcatataaccgatttggtgttctttatggttcggcacgcttccttcaatcagcacccggccttgcgcaggagtaataaggccggccagaatggacaggagtgttgtttttccgcatccgctcggtccgagaaaggagatgaaatcccctttttcaatctgaaaatgtatatctttcacggcggttgtcttttctttcagcgagaaataagtatgtgttacatgatccacatgtaaaaaagacattcatgttcctcctattgttctgaggtgacttttttggcgatttttgtgttgacgagtttgctgtacggaatgtgtttcgggagctctccggcttcatccataatagattgaagctgttcccattcatccttttgcagaactgggtctgcagagaatgacttttgttttttatatcgctctattgatgtttcgataatggccggatcggtatcggcaaattccttctgaatcgtttttgcgatgtctttggccggatggctttccacccattgctgggcgcgatagatggcgcgggtgaatttttccgccgtcttttcattggttttcaaataactttcttttgccataaaggttgtgtacggcatttggccggaagcttctccgaaggatgcgacgatatggccgatgccttctttttcaaattgggatgccgtcggttcaaacagctgcacataatcacccgttccggatgcaaatgcgttggaaatattggcgaaatcaatgttttgaacgaggttaatgtcttttttcggctctatgtgattctttttcaggacgtactcaccggccatttggggcatgccgccttttcgctggccgagaaatgtttttccttttaaatcgctccatttgaatgaattctcatccttccgtgacacgagaaatgtgccgtccgtctgtgtcagctgcgcgaagttgatgaccggatcttttgctccctgcgcctccacgtaaatggatgtttcagaaccgatcagcgcgatgtctgacccgtttgacaaaagcgatgtcattgttttgtctccgccccatgttgtttgaagtgacacttggagcccttcttttttaaagaaaccttttgcttcagcgacatacagaggcgtatagaagatggagtgtgtgacttccgccacctttacctttgtcagactttcttcctgtctgcaggccggaagaatgagcaggaaaaaggcggatatgacaaaaacgcagcccgttttgagccatttgttcacggtgtaacctccttgttttaagcgttaaataaccttttctgctttacatatcgtatgatgggtataaaaaatgtgtgagtgcccatattcacgttgggaaagaataaaaaaactgatgatataaggaggccattgttttgctggtagaaaagaaaaggttcccgtctccgagtccgcatatccgcctctttgaggtatgctatgagtcagaagggctgaaggtaaaggggcttcttgccgagcctgcggcgccgggaacatatgacggttttttatatttgcgcggcggcataaaaaatgtcggcatggtacgccccggaagaatcgttcaattcgcttcccaaggctttgtcgtgtttgcgccctattacagaggcaaccagggcggcgagggaaatgaagattttgcgggagaggacagagaggacgcgttttccgctttccgcctgcttcgggagcatccgaacgtcagggaagggcgggtgcatattttcggtttttcccggggcggtatcatggggcttttgaccgcgattgaaatggggcatcaagcggcttcgctcgtatcatggggcggtgtgagcgatatggtgcttacttatgaagagcggaaggatatgcggcggatgatgaagcgggtgatcggaggcacgccgaaaaaggtgccggatgaatacagatggcgttcaccgtttgaaaacgcagaccgcattcaggcccctgtgctgctcatccatggagagaatgatgagaatgtttcgatcgaacacgcccgaatgatcgaggacaagctgaaagaggcggggaaaccggtggaaacttggtattacagcggttttacgcattattttccgccgcaggaaaacagacgcattgtccggcggctggcggaatggatgaagacacggtaagatgcctgatttatgatatgataataaagaataagagaatgaaaggggattttcattttgggaatgcctgttgaatttaataccatgattgtgacaaaaggcaatgaaaaacggatagaggaaaatatctttttattggagaaagagggctaccgcgtctatcctcttgatattccgatggacgtgcgcaaaacgaaaaccggcgagaaatccggcaccggcgaggttcaaaagctcgaatgggcgaacggccggacaagcattacatacagactcacgtcgctccattcgacaaactgaaaaaacaaaagccaagggcataaacgcccttggcttttttgattacacgagaggtccgccggctttggcaatcgagtctgcatgggaaaactttttaaagttttctttaaactcattggctaaaaacagcgctttttcgttgtatgcttgtttatcgctccatgtgttttcaggctgaagaacttcatccggaacgcccggaacatgaacgggactgcgcaggccgaaaatgctgtctgccgccatgtcagtctggttcagtctgccttcaatagcggccttgaccatcgctcttgtatacgaaagtttcatccgttctccgactccgtaccctccgccggtccagcctgtgttgaccaggaagacttgaacgccgtgttcgtcgattttatgcccgagcatttcggcatatacatgcgccggaagcggaaggaacggtgaaccgaagcacgtcgagaaagtcgtttgcggagatgtcacgccgcgctcggttcccgcgagtttactggtgtacccgcttaagaagtgatacatcgcctgttccttcgtcagtttgctgatcggaggaagcacgccgaatgcgtccgccgttaaaaagacgatcgcctgcggatggccggcaatgctcggctgcacgatattgccgatcatctcaatcggatatgcggctcttgtgttttccgtgtagaaggaattgtcgtaatccgcttcacccgttttttcatcaagcacgacattctcaagaacagacccgaagcggatcgcacgaaaaatctgcggttctttttcctcgctgagattgatacatttagcgtaacatccgccttcaatgttgaaaacgccggaatctgaccagccgtgctcgtcatcgccgatcagtttgcggtccgcatcggctgaaagcgtcgttttccctgtgccggaaaggccgaaaaacagggcgacatcgcctttttcaccgacattggctgagcagtgcatcggcagtatatcctgctgcggaagcaggaagttcataatggagaatattgattttttcatttctccggcgtattcggtgccgccgattaaaatgacgcgcttttcgaaagagacaatgataaatgtttccgaatgcgtgccgtccgtctccggatctgctttaaaatgcggagctgagagaatggtgaaaggctgcgcttgcgtgtctctttcatccgtctccggtctgataaacagctggcgcgcgaataaattgtgccacgcaaattcatttacgaccgtaatcgggagtctgtatttttcatccgctcccgcgaatccttcaaatacaaacagttcatcccgctgttttaagtagctgacgactttggcgtacagcttttcaaacgcctcttcagaaatgggctgattcaccgcgccccaatcaatttgattttctgtgctttgttcacggacgataaatttatctttaggtgaccggcctgtatatgcgccggtggtggcgcgtacggcgcccgttgatgtcagcgttccttcatttcggctgatcactttttcggtaagttttggagctgataaattatgatgcacattcggacttgcaagtaatgcttgaagatctgcggttaaatcaactaatttcataaaaaccttcctttgccggtttatttgtatttcgctgaatgtggaattagtataacatatatctgaaaatagtctatactatttgcggttttttgtttgtgtttttccattgcttcccgaaataaaggcgcgtaatcgctttaattcatattgacactttccgcccttttacgataagatatttcattgagcggatactcttatcccgagctggcggagggacaggcccgatgaagcccagcaaccggtttctctgtaaaaaagcaggtgaaaacactgtgggaaaccaaggtgctaacctgatgcaaggtttaatattttccttgagcgataagagtgaaaggcacacagaccaaaccctttcctcgagtggaaaaggtttttttatttcataaaatatgccaattaacattctctgatatagtatgacattgtattaagagggagcgagttccgtatcatatgaaaaggtcttgcaaaagatcttttttcaggaggaaaagtgaatgagtaaaaaccgtcgactatttacatctgaatctgttactgagggtcatccggacaaaatctgtgaccaaatttctgacagtatcttagatgagattttaaaaaatgacccgaacgcgcgcgtggcctgcgaaacatctgtaacgacaggacttgtgctggtaagcggagagattactacatcaacatacgttgacattccgaaaacagtccgtgaaacgattaaagaaatcggctacacacgcgccaaatatggatttgatgcggagacttgcgctgttttaacatcaattgatgaacagtctgcggatatcgcaatgggtgtcgatcaggctcttgaagcgcgtgaaggcacaatgagcgatgctgaaatcgaagcaatcggagcgggagaccaaggcctgatgttcggttatgcgtgtaacgaaacgaaagagcttatgccgcttccgatctctttggcgcataaattagcccgccgtttgagcgaagtccgcaaagaagacattcttccgtaccttcgccctgacggcaaaacgcaagttaccgttgaatatgatgaaaacaacaagccggtccgcatcgacgcgatcgtcatttcaactcagcaccacccggaaattacgctggagcagattcagcgcaatctgaaagagcatgtcattaatcctgtcgtgcctgaggaactgatcgatgaagaaacaaaatacttcatcaaccctacgggacgtttcgtaatcggcggacctcaaggtgatgcgggtctgaccggccgtaaaatcatcgttgacacatacggcggatatgcacgccacggcggcggcgcattctccggtaaggatgcgacgaaggtagaccgttctgcggcatacgctgcgagatacgtagcgaaaaacatcgtggcagcaggtcttgctgattcttgtgaagtgcagcttgcatacgcaatcggcgtggcacagcctgtttctatttccatcaatacatttgatacaggaaaagcttctgaagaaaaactgatcgaagtcgtacggaataacttcgacctgagaccagccggcattattaaaatgcttgatctgcgccgcccgatctataagcagacagctgcttacggccacttcggacgtcatgatgtggatcttccttgggagcgtactgacaaggcggatgcgcttcgcaaagaagcactaggagaataattttatagccgcttacttaagcggctttccctttttgtagatgctgccatgcttattttttacatagcgtgaaaccaatggcgtaacaaagcgtctataaaaagggggtccaattagaaaattacacttatggaggctatactatgtgtggatttgtcggtgtttttaataagcatccattaactcaaaccgcagatcaagaagagctaatcaaacaaatgaaccaaatgatcgttcaccgcggtcctgacagcgatgggtattatcatgacgagcacgtcggattcggcttcagacggctcagtattattgacgtagaaaacggcggacagcctttatcatatgaagacgaaaaatattggatcatttttaacggcgaaatctataactacattgaattgagagaagagcttgaagcgaaaggctacactttcaatacagattccgataccgaagtgctccttgcgacataccgtcattataaagaagaagctgcttcaaagcttcgcggaatgtttgcgtttttaatctggaacaaagctgaccgcgtcatgtacggcgcgagagacccgttcggaattaaaccgctgtattacacaaccatcggggacaaagtatattttgcatctgaaagaaaaagtttaatggccgctcaaaacggcattgatcttgatacagcttctttacagcaatatatgtctttccaattcgttcctgaaccgagcacgcttgacgctgaagtgaaaaaagttgagccgggcagccagtttacgatccgcccggaaggcgacatcgcgtttaaaacatatttcaaagcgaactttaagcctgttcagtctgatgaagataaattggtgaaagaagtcagagacgcaatctttgactctgtcaaagttcacatgagaagtgacgttcctgtcggttcgtttctatccggcggtatcgactcttcttttatcgtctcagttgcgaaagaatttcacccgagcctcaaaacattttccgtcggttttgagcagcagggcttcagtgaggttgacgtagcgaaggaaacggctgccgcgctcgggattgaaaacatcagcaaagtcatttctcctgaggagtatatgaacgagcttccgaaaatcgtctggcactttgatgacccgcttgcagatccggcggcgattcctttgtactttgtcgcgaaagaagcgaaaaaacatgtaacggtcgcgttatccggggaaggcgcggacgagctgttcggcgggtacaatatttaccgcgaaccgctttcgcttaaaccgtttgaacgcattccgtccggtctgaaaaaaatgcttcttcatgtggcgtccgtcatgcctgaaggaatgagagggaaaagcctcttagtccgcggctgcacaccgcttgaggagcgctatatcggtaatgcgaagatttttgaagagcccgtgaaaaaacagctgctcaaacattacaatccagagctttcataccgtgatgtcacgaagccgtactttacggaaagccgttcatacagcgacattaataaaatgcagtatgttgacatccatacgtggatgcgcggcgacatcctgttaaaggctgacaaaatgacgatggccaactcattggaactgcgcgtgccgttccttgataaagtcgtgtttgacgtggcttctaaaattccggatgaactgaaaacgaaaaacggcacgacgaaataccttctgcgcaaagctgctgaaggggtagtgcctgatcatgtgcttaatcgcaaaaaactcggcttccctgtgccgatccgccactggctgaaaaatgagatgaacgaatgggttcgcaacatcattcgtgaaagtgaaacagatgcttatattgaaaaggattatgtccttcagcttctggaagatcattgtgccgacagagcggacaacagccgcaaaatctggaccgtgctgatctttatgatctggcacagcatcaatgttgaaaaaagactggtgccggaagagctgaatcatcagccgaaagaagtcattttcgtttaatccaaaaggctttcgatgttatcgaaagccttttttctattgttttttttgtaaaccgtctattccgctctgttttcgacaaagtattacgcaatattcagaaaaaggttataataggactaatcgggtagattccggaaagtgttttctggctatttcgtctcggtttgttgtttctttgtcaaaatcagggggagggagagttatgcaaaacaaagaaaaaacgcttcaccgcggcttggaagagcggcatatctcgcttatgtcgttgggcgccgcgataggagtcgggctgtttctcgggtcggcttctgccataaagcttgccgggccggggattttagccgcttacgcctgcagcggactgattatgttttttattatgcgggcattaggggaaatggcgattcaaaagcctgtagccggctcattcagccggtatgccagagattacctcggtccgcttgccgggtttttaacaggctggaattattggtttttatgggttgttacctgcatggccgaaatcaccgcggtcggcatttatatgggctactggttccctgacgtgccgtcatggatctgggcgctttgtgcactcgtcattatgacggctgtcaactttctggcggtcaaagcgtacggtgagcttgaattctggtttgcgctcattaaagtcttggcgattctgtcaatgatcgcgatcggtctggtgatgatcgtattcggtctcggaaacggaggcgttgcgctcggaatcagcaatttatggagccacggcggctttttcccgaatgggattaaaggggtgctgctgtcgcttcaaatggtcatgtttgcctatctcgggattgagctgatcggtgtcacagccggtgaggtcaaaaatcctgaaaaatcactggcgcgtgccatagatactgttttttggcgcattctcattttttacgtcggagctttgtttgtcattatgtcaatttatccgtggcaggaaatcggttcaggcggaagcccgtttgttttgacatttgaaaaaatcggaatacctgctgcagccggaatcattaattttgtcgtattgacggcggccctttcttcctgcaacagcgggatcttcagcacggggcgcatgctgttcaatctggcggaacaaaatgaagcgcctaaagcatacggtacggtcacaaaaggcggtgtgccgggaaaagcggtattggtttcagcgggcgcgttatgcatcggcgttttgctgaactacgtggtgccggcgaaagtgtttacgtgggtgacgagcattgcgacgttcggtgcgatttggacatggtcgattattttgctttcccaaatgaaataccggaaaagcttacagcaagaacaacggaaaaaactgaaatataaaatgcctttataccccttttcctcatatatctcattggcatttctcgcttttgtcgttgtgctgatggcttttaatgcagagacccgggtggccgtcatcatcgggcctgtctggttcggcatattattagccgcctattacgggaaaggtttccataaaagaaaagacataggtctggaaaacggacagacattcgccgaaaaagcgtaaaaaaagagcccgggacatgggctctttttttcataggatcgggccggcggggaagaataaaacaaattcctgaacattttgcttctgtttcctgacaatcgggagaatgcaaatggtttttacttaaataatattttgaaaaatggtacagtaataaaacaaagctgatcttttttatttctcttgcagtgttttatagtatcggcctttttcaacatattccgttctgattctttccatgtcccgtatgtcttcttctgtcagccggcggataacctttgcgggccggccgaacgcaagacagccgggaggaatggttttgcccggaggaacgagacttccggcgccgataaacgcgccttctccgatttccgccccgtcaagaatgacggagcccataccgattaaagcattctttttgatgattgcgctgtgcagtgtaacctgatggccgatcgtgacgtcatcttcaataagaagcgggcggttcggactttgatgcagacagctcaagtcttgtatgctgactctttttccgatccttgtcggcgcaacatccccccggatgacggctgagaaccaaatgcttgattgttctccgatcacgacgtcgcccgtaatgacggcgttatccgcaatgaacgcttcagaatgtatgtcaggcgtaaattgtttataagggtagattatcatgtctcatccttctttctctaaatttatgtaagaggtgaactgcatgtggacttggaaagcagacaggcccgtcggtaccattgtcattatccacggggcaagcgaataccacggacgttataaatggctcgttgaaatgtggagatcttccggatataacgtggtgatgggcgatttgcccggtcagggaacgtcgacccgcgccagagggcatattcgctctttccaagaatacattgatgaagtagatatatggattgataaagcgagaacgcttgaagcgcccgttttccttttgggccacagcatgggcggactgattgcgatagaatggtttaagcagcagagaaatccccgcattacggcactcattttatcatcaccttgtctgggtctgcaaataaaagtcaataaagtccttgattttgcgtctaaaggactgaacgtcctcgctccgtccctcagagtggattccggcttatcacctgatatggcaacgaggaatgcggatatgattgaagcggatcaaaacgattctttatatgtcacgaaggtatccgtaagatggtacagagagcttttaaaaaccattgatgccgctatggtgccgactgatgcgtttttaaaggtgccgcttttgcttatgcagggcggagatgacaaaatcgtcgataaaatgaaggtccgcaaatggttttccggtgtggcttcccataataaatcgtaccgggaatgggaagggctttatcatgaaatttttaatgaaccggaaagagaaactgtgtttaaggcggcaaaagtctttacagatcagtatatttgaattcgctgggggtgcatatgttgacagtaccggaacatccttttaaccttatggcaaaagtgtatcgggaaatttttccgctcgttcatcaggaattgaacatgtggcgggaaaaatcagattccattaaaaataccgaactgcggcagcaggcggccgcaagtatccgcgataagtcgtttcattgtgaaggcggcggcattttagccctgctttcgggagagcagaaacagaaatgcgtgcaatttatcatcgcgtatcagacaatcagtgattatctggacaatctgtgcgaccgcagcacctcgcttgatcccgaggacttccgcatgcttcatctctccatgcgtgacgcgctgacggtcggtgccgaggtgcggccgtactatcagtacagagacgagcgggatgacggcggttatcttcatgagctggtcagaacatgccagcgggtgctcgggtcaatagaacattacggtatcattaaaccttatttgcttgagctgtgtgattattattgcgatcttcaggttcataagcatgtcgttgagcatgaacgcgttccgaggcttaaaggctggtttgagcagtaccggtcacagcttccggaaatggagtggtttgagttctcggcttgcgccggatcgacgttaggcattttctgtctcgttgcttactcattccagcctgattttaacgaacataccgctgagaaaatccgcagcagttattttccgtacatacaagggctgcatatactgcttgattatttaattgaccaggaagaggatctgcttgaaggcgatctgaatttctgtacgtattatcagtctcatgaagaaatgatgcagagactgcagcattttattgaaaaagcggatgaacatttgcaaggcattccgcatgaaaattttcaccggctgatcaacagagggctgctcggcgtctatttatccgatgacaaagtcgccggccaaaaagaaatgggccgcctcgcgcgaaagctgatcagggcaagcggaaaaacgtcatttttcttttatatcaacggaagagcctaccgcaaatttcagaagatggcttggacgaaaagttcgtaatgggtgaactgcgcctctcgtgtaaatcacgacggcgcagttttttatttatgacgtgaagtatgaaatgaaacattgtttgcgcctgcagaatatgatactttaattttatgaaaaaattaaagtatttagcggccatagcattactttccatttccggaggctgctccgtcatccatgcttccgccggctatcatcctgtcttgatagcgcacaggggctcttctgcgattgagccggaacatacagctttgtcttatgcgcgtgccattaaagacaaagcagattatattgagatagacttacgggagacgaaggacggccgtctgattggaattcacgataaaacggtagatcggacaacagatggtaaagggatgacagatgatctgtctttggctcagattaagaaactgaatgcgggaaaaggagaaaagattttaacattagaagaaatcatacagaaattcggacaaactgccaattactatattgagacaagagaaagcaacggcagcctggtgatggaaaagaaactgattgacatattacaaaaacataagctgatttccagccataaagcagtcattgagtcttttagcgggaagagcttaaagaaagttcgatctatggataaaaaagttcctcttgttcgattattaaaagataacgaggctgaggagataaatgataagcagctgcaaaccatcagaacgtatgctgatacagtcgggctcaacgccaaattggcaaatgaagcagtcgtgaagcgcattcatcacaataagatgaaagtgcacgtgttttttgataaggaagacgagcatacgctgacgcctattatgctgaaacaaaaagcagatggtgtctttacgaacaatcccgcttatacacgcagcgtgctgcaaaacagtaaataaaaagagacatgcgcattttacgctgtctctttttttaacggtttcttttttgccgcaaggtgcattgcgaatttgccgatcagcccgatgacaaaaaatgcagcaaaccaccagtaataggtttttgcgaactcaaatcctaaatgtcttgataaaatgatgacgaacatcacatagggaacacttgaaaatatgatgcgaagaatattcaaactgccgctcctcccagatgttacacttaaaagatgtgcttttttccattatttcatagtaattgatttttcttgaaaagtaaacacaaaaagaatcggcccgcttatgacaggccgattctttatttgccggcagatttcttttcaatcgctataataaacggagggtcgtttcgctggttgagaaagccgtagctcagcacgcgcgctttttcctgatcaagattgctgcagtactccagtaatgcacttttttccgtcttgccttcaggatgcccgtggtacacaacgagaacgatcagcccgttctccttcagcagttcaaggagctgttcgatcgcggaaatggttgagtggccgtttgtcgtaatgcttttatcgccgccgggcagatagccgagattaaacacggcgcaagccacacgaccgtgcgcatcctcaggcagcgatgcctttatttgatcatggctcttatggtgaagcgtgacgcgcggactgaagtcggcaccgagccgctccttcgttttagcgagtgcgtccgcttgaatatcaaaggcatggacatgtcctgtctcaccgacaaggccggccaggaaatatgtatcatgtccgttgcccatcgtcgcgtcaaccgtgatatcaccttcctgtgcggcggacttcagcaattctttactgaaagggaggatgtgcatcaaggtcatagggcggtctcctccccgatctttctgaagagctttccttgatagcttccccgtgtttccagctctttttgaatggcgcccagtacttcccacttattgacgctccacatcggtccgaccattaattcgatcggcccgtctcccgtaatgcggtgaacgatcatttccgggggaatgatttcgagctgatcacatacaagacttacatattcttcttgagaaaggaactccagctttcctttttcatattgcttcaccatcggtgtgccttttaataagtgaagcaggtgaattttaatgccttggacatccaaatcagcgacggctttggccgtctccatcatcatgtccctgttttcaagcggaagcccgttaatgatatgggaacaaacgcggatgccgtgttttctcagtttattgacaccctcaacatagcagtcaaaatcatgggcgcggttgatcagaagggcagtccgctcatgcacggtctgcagtccgagttcaacccacaaataggtccgctcattcagttcggccaaatattccacgacatcgtccggaagacagtccggacgggtcgcgatcgacatgccgacaacgccgtcaagcttgaggacggattcgaatttttctcgcagctcctctaccggagcatgcgtattcgtgaacgcttggaaatatgcgatatatttgccgtctttccacttttcgtgcatgcggtttttgatatcgtgaaattgcgtgagtaagtcatcggcccgattgccggcaaaatcgccggagcccgccgcgctgcagaatgtacagcctccgtgtgcaaccgtgccgtcccgattcgggcagtcaaaaccgccgtcaagcgcgactttaaacactttatgcccgaaatgctcccgcagatgataatttaatgtatggtaccgtttttccgtatttgaataaggaaaagggttattctcgttcaatgttcaaaaagcctccctcacatcagatgcatcctaaaattgtagcatgaatgatgggggttcacaatctgaaaacaggatgcggctttcttttgtttattatgactgcgggcaggattctcattcttttagcttaaacgcggaaaatttggttctctttcctgcaaccttcgggtgttattatttttggtccgctcaaactaagtttgatttcccattcactgaggaggggtttcgttggcaacaagacaatcagtagatgaacatctccaaagaagcgaacaggcgtatgaatttgcgaatgagcaatttatgaccgcttcgaaacaagagcattataatgataatgagtacagtgaagcgcaaatgatgcttgaaaacgcggtgaatgaattaaacaagctgtcattatctgcgaatgatcagcaaagagagcagctttaccgaatgagattgcagctgcagaccttgcaaaacaatatgattttgcagcgtaattttgattactgaccgcgccgtttcaaatggttcagcaaacctgccggaatcccggcgggtttttttgtatttttttaaaaaaagaattgacaatagggcggagtgtgtttattgtattacgtgtactacttgatgtaatacacataaaacactcgaaaaatgaaatcgacatataaatgttaaccatagggaaggggaactttcatgaaaaacaaaagatccgtaaaacaagatgtgcctcttattatcgccgcctcggttttggcaagcagtctgtttgtcgttcttgtcgtcatcggttttcaatggcagaacatttaaagaaagagagcagctcgtaaaagaaagaagggaagtaaatgattcaaatcgatccgagaagctcaactccgatttatgagcagatcatacagcaactgaaagagctttgtttaaaagggatcatgaagccgggggataaacttccttctgtcagggaattggcaacgatcattatcgccaatccgaacacagtcagcaaagcgtacaaggagctcgaacgcgatggtgtcattgaaacgctgaggggaagaggaacgtatatatcggagaatgcaaaaacgacattggttgaagggaagatgacgatgataaaagagcaattgaaacagctcatcatcgatgcccattacgcgggagttgagctggagaagctgcaggaatggataaaggaaatcagcgctgatgtgaaaggaggcaaggatcatgattgaattgcggaatctctcaaaaacgatagacggtaaagaagtgctcaaggatatttcgctcaccatcggaaaaggggaaattttcgggctgctcgggcgaaacggatcagggaaaacaacactgctccggctcattcaacagattctgctgccggatcaagggacggttttatttaatcaggtggaaataaagcggcatccgaaagtaaaacagaacatcatttatatgcctgttgaaaatcctttttatgacaagtatacatataaacagcttgttgcgattgtaagcagaatctatccgaattttgatgtgacttacgccaatgagctgatgaacaggtacggcattccggaaacgaagaaataccgtgaattatcgacaggcctgaaaaaacagcttgcgctcgtccttgcctttgcttcacgcccggcacttattcttttggatgaaccgacggacggaattgacgccgtaacgcgtcatgatgtgcttcagcttatggtggatgaagtggctgaacgggaaacgagcattctgattacctcacaccgtttagaagatattgagcgaatgtgcaaccggatcgggtttttggaaggaaatcagctgacgaatgtgatggacttggatgatatgaaggaagagtacatgaaaatccaaatggcatttgaagaaaacgtcgccttgaagatcagagaacaaaacataccgattctcgaccatgccggtgtgttttatacggtgctgattcaaaagaacgatgagaagaaaaagaactttctgcaagagctgcagccgaaagtatggaacgagcttcctgtgaacttagaagaagtcttcatcgcgaagtttggagggaaccgaagatggtagacaggggattgctgtacagggaatgggtgcagaatcgaactgttcttgtgatggtcggcctttttttagccgcggtcaatccgtttgaagtgttaaatacctatctggtctatcaaggctgtctggacaccccggaagcatattgtaacttttatgtgaattctttggatagcggaatgctgaacttgaactgggcgcccgctgtcattttggcggtttgcttattcggactggagcgtacgaaaggtacgattgatacgcttttcagtctgccttattcccgcgctcaggtgtttcacactaaattttggctcggggcggcggtcattgccggattccaaatcatcggctacgggctggctgaactgctcattcttctgttaaagcctgagcgcgtatatttcttccaccattacagcgtcggagagattattgtgagtgttttggcttttacattggtcgcgagcgcaggctgcttaacggggaatacgttcgcccagctgttaacggcgtttgccgtgtcgatagcgccttacctgattattacgctgcccctgtccaatgtagaagtcatcttcggagtcagcatgtatgagctgatgccgtcagtcgaggcttatcttaaagtaaacaatctttttcaatacttgaatccgatcatgtacattgatacagattgggtatctgccagcaagtatatattactcatcccggcagtgatgagcattctattttatgccattgggtacttttgctatgtcaggcagccggtggaacggaacggccgtttttttctctggagacagcttgaccggcccattcagattgtggtgattataatcgccgttctcggttttggcctggcggggtactcgacgggacatacgatgacagggtatgtggccgggatgattgtcgggggagcggtcggatttttggtcagttattttgtgatttataaaaaaacgaagcatgtgtaagagaggaggaccggaatgataccgcggggattgttgtacacagaatggaagaaaaatcagtggttgtttttatgcagcggcattcttttaatggcggcaaacccttttatggtttataacaactactcaacatatcaagaatgtttgaataacccagctcttcaagattgtgaattcgttgtcaattatacgaatgggtcgcctctttccttcagctggagtgtaagtgtcatcattgctgtcttcttattaggcttggaacggacaaagggaacgatggatgccttgttaagcatgccttacagcagaggccaaatctttcagacgaaattctggctcggcgcagcagtcattgttgttcctcaggcgataggctatggagcggcgtcattgctgatatctttgctgaaaccgagccatacgtacgattttgatcatttttcaatcggaatgattgtcatcagttttatggcttacgccttgttaatggcatccggcgcattaacgggacagatattcgcccagctgttaacggcgtttaccgtcacggttctgccctttttactcatcggtctgccggccgcgaatttggaggtcgttttcgatattagtgtgggaagtcaattttcttttatcagcagttatatcgaatcccgtctttttatatttgtaacccctattggatatgtgtttaacgactggatcagagaaagggatttggttttaatcattccgattgtgatgagccttgtcttttatctgatcggttatgtcagctttctgaaacacccgaatgaacgggacggcagattctttctttggagtaagttggaccgtccggtgcagatcttggtgattgcctttgctgttatgggtttcggcgttttcggatatggggtcacagacacgatgttcggctatttagccggcattatcttcggcgcggttatcgggtttttcatcagttattttacggtttacaggaagtcaaagcatatgtagatctgtttgaaaatgagcagtttggaggaaggcaaggtgccgattagcggtttgctttataaagaatggaagcagcggcagatgctgctgcttcttacagcggggttcttagctattttaggccctttggcaattataaatgagtattttcactataaggattgtttgagtgcgcttcatcaatattcaggttcagtttgtacgttcagtattgattacagcaatcggaatttgatcgggctgcatttcattcctccggttatgatggggctttttctgataagaggaggccgggctgaaaggatgtttacactgagtcttccgtattcgagaagccggatatttcatacgaagtttttcttgggagcagccgtgttagccggctcgcagtttgtttcttacggagtatctgacatattgtttctagcgcttaatcctgacgctgtccatcattttcaatcgttcagcgcagggatgctggtcatcagcttgatgatttatgcattagtgacagctgccggcacgataacgggcaatttagcggcgcagctgatcacagcgttcacggtttccgtctttccgatcgtggttatgacgatttacctgttaaacgctgagttcctttttggcaggcaggctgtgccggatattgatttcccttggagcggatttctgatctatttcatgcctgccgcttacatccatacatcatggatgtattacatgaaacacgcattgttaatttccgcattaatgggatgttgtttctatctattcggttatgtgaatttcctgaaaatgccgagtgaacgaagcggacattttatcctaagcaaacacattgaacgcatcattcaattgctcgtcatgtcgctcagtatgctgggaagtgcgggggtatgcggatatgcttataacggttcgtataccggttacatattcggcatgcttatcggcgcggttatcgggtttttcatcagttattacttcatctataaaaaaacgaaacagatataagggggagtggtgtacgtgatagaagtacagcatattgatcattcatttaaaatcggcaggaaaggcagagagagtgaggttccggtattgaaggatgtctctttgaccgttgaaaaaggggaaattgcctgtatcgtcggtcggagcggttccggaaaatcaacgcttctgaatttaatatccggatacatagcgccgacgaagggccgtatcgtcattaacggcactgatgtgacgggcttcagtgaaaaagagtgggcgcagttccgcctcgggcatttcggctttatttttcaaagctttcagctcattccgagtctgacaacctatgaaaatgttgaaatgccgcttgccttaaaaggcgtcaaaccgtctgaacgcaagcagaaagtcgcggacatgctgaaacgggtcggacttgagaatcatgcgaatcattatccgaatgagctgtcaggcggccagcagcagcgtgtcagtattgcaagagccctgattttaaatccgtcaattattttagctgatgagccgacgggaagccttgattcagaaacggaacttgaggtgcttgcattaattcagcagctgaaccgggagcgcgggattacatttgtcatcattacgcatgacgatgaagtcgcttcgatcgcgcattcaaaattccagctgcatgacggtgtattaaaagggggcgttactgttgagatttaaggatcagattcactttatcagaagaaatatgaagaaaaaccggctgcgtgttttcatgacggtgctggcgacgacaatggcgtgcgcgtttttagtggtgctggcttccgtcggattcggcatccaaaaaacgattacagacattaccatgagccagcagattgttacggaaatcaatgtgctcggccaagagaacggaaaagccgtgaagaagtcagacttggaaaagtataaaaatgtcaagtctgtcgttgaaagaacacaagtgtatgaaccgaacaaagcgtcattgggaaaccgaacaaatgaagattcagccattgtgctgacaaacatgaacgatgaagtcaaagccaatatggagcttgatcagggaagagtcgcccgcacagagaatgaaatcgtggtcggctatgattttgcgaagaacctattgacgaaaaaagaggctgacgcttacgacaaagagttaaatgatcaccaaggcgacatgtcggaggtgaaaaaaccaaaaggctatacgaaagacctgcttaataaaacgatacagctgagcatctccaaaactaacaaagacggagacgttgagaaaacgaaaacgtacgactttaaagtagtcggaattacaaaaaaaccgtcccaagattggatggaggatacaaatatttttgtgagtgaccaattcaagaaggacttctcaacattcttggatctgaagaatggaaatgcggaaaaaagcatcaatgtgtatgcggacaaattcgatcatgtcgatcagcttacccatgacctcacggatgacggcttttatgtcagatctgtcacaaccgagctgaagggcgtcaacacctttttcctcgtctttaaaatcggcctgatctttgtcggctttatcgccgtcgtgatttctgccatcggtattttcaatacgatgacgatggcggtgacggaacgaacgcaggaaatcgggattatgaaagcgatcggcgcaagcccgtccatcatccgcagaatgttcctgatggaaagcgcctatatcgggatattaggttctgtcatcgggattatcatttcttacggagtgagttttgccgtcaatctggctgtgccggttatcttgaaagcggtagggggaaataccggagccgaagatcttcattataccttctcctatatcccgctcagcctcgttgtgattgcagttgtcatttgtgcgggggtcgcggtgatttccggtatgaatccggcccgcaaagcgacaaaaaccaacgttctgactgcattaagaagagaactgtaaaggaaaaaagccggctggacatcagccggtttttcctctatctatcagaaaagggcggataccatgtttcacattttgttaatagaagatgataacactttgtttcatgagatgaaagagagattaacgggctggtcatttgcggtgcacggaataaaagatttcagccgggtcatccgggagtttaccgaaatcaagcctgatttggtgatcattgatgtacagctgccgaaatttgacggctttcattggtgcagaatgatacgctcccaatcaaacgtgccgattctctttttgtcctcgcgcgatcatcccgcggatatggtcatgtcgatgcagctcggggcagatgattttattcagaagccttttcactttgatgtgttaatcgcgaaaatacaggcggtgttccgccgtgtgcatcaatacggcacagaaccggcactgatgaaaagatggtgcggggcggtcattgacacagaaaccaacacggtcagccgtaaaaacggttcggtcgagctgaccaaaaacgaaatgctgatcttaaaactgctggctgagcagaaaaataaaatcgtcagccgggaagaactcatcagaagcctatggaatgatgagcgtttcgtcagtgataatacgctgacggtgaatgtcaaccggctgcggaaaaaactcgatcaattaggcatcgggaaaatgattgaaaccaaggtggggcagggatacatcgcaaaggaagaagacggtctttatgattaaatcatttctgctcgaaagaaagagctggatcgcgatgtttcttttgcagcaggctgtgctcctttttgcggcatatattgatccgtctattccgtttctttcagtgctgtatttcgtttacctatcgcttcttgtgtttcttgtatttctcttgttccgctatcgtaaagagaccgcctattataaaagcttaagagagtgggacgccaatttagacatgtcttatctgaaagcgcctgaaagtccgtttgagtctatcgttgaagaaagcattgaagggcagacagagcagttaagaaaaagctcacttcaccttcaggcggcttcagagcatgaaaaggacgatctgatgtcatggattcacgaggtcaaaacaccgatgacagcgatgcatctcatgattgagcgtcttgatgaacagccgctgaaagcccctttgctgtatgaatggctgcggattcaccatcttctggaccagcagcttcatcagaaacgattgtcctttattgaaaatgatttatcattccagcgcattcagctcaggccgctcgttttcaaagaaattaaaaatctgcaatcatggtgtatacaaaaagggatcgggtttgacattcagcttgattcaccagacgttcacagtgacggaaaatggctttccttcatcatcaggcagctgttaagcaatgccgtcaaatacagtgaggcggatgacattaccgtaaaaagctatgaacaaaacgggcgggtgcatgtggatatcgaagaccgcggcatcggcatcgagcccaaagatcttccgcgcatttttgaaaagggatttacctcgacgcgaatgaggcgtgatcacgcgtcaacggggatgggcctgtatttggctcaaaaagccgcggcaccgcttcttatccagatcagcgtgcgctctgagccggaaagcggcacggtttttaccttggtgtttccgaaacagaacgatgccgtcagcatgttcagcgtgtgacaaaagtgtcacatgcttttctcttttgttcgcttaatcaaacgaaaaaaacggcttctgttttttaaaatagagataaccaatgtaaaaggagaatcagaacgtgatgattttagaagcaggcaatatccaaaaaagctacggaaacaagctgaataaacaagaggtgctgaaaggaattgatcttcagattcacaaaggggaattcgtcagcattatgggcccttcgggatcagggaaaacgacccttttgaatgtgctttcctccattgataaagtgagcgcgggcaccattaaactgaatgagacggagattacatccatgaaagaaaaacagcttgccgaattcagaaaacggcatctcggctttatttttcaggattataatttattggataccctgaccgtgaaagaaaacatactcctgccgttatccattacgaaaatgtctaagaaagaggcggacctgcgatttgccgagacggcagaggagcttgggatctatgatttgagacataagtatccgagtgaaatttccggcgggcaaaaacagcggacgtctgccgcaagagctgttattcacgagccgggcattatttttgctgatgagccgaccggagcgctcgattcaaaggctgccatggatttactgaataaactcagccgtctgaatcaaaaacgccgcgccaccattgtgatggtgacgcatgatccggttgccgccagctattccggacgtgtggttttcattaaagacggccgtgtgtatacacagctgaataaaggcggccaggacagaccggacttttttcaggatattatgaaaacgcaaagtgtattgggcggggttcaggcatgagtattcatcatttgatcttccagaacctgaaaaagaatttgaaaaactattacctttacgtttttgcgctggtgttcagcgccgccctttatttcgcgtttgtcacgatgcaatacgatccggcgcttgatgaaatgaaaagctccataaaaggagcggcggcaatccgggccgcctctgtactgcttgtggcgatcgtgtcggtatttcttttatacgccaacactatttttattaaacggcgcggccgggaaatcggcttattccgattaatcggcatgacgaaaatgcacattttccgcatactcagcacagaaaatttcattttgtatttcggatcgatttggatcggtatttttgccggcttttctctctcgaaattatgtatgatgatgctgtttcatacagtcggtgtgaaagcctctgtctcactgtttttttcaagcaaggcgctcgttcagacgttaattgtgttcggggcgatttacgtgctgattatgatgatgaattacttatttattaaacggcaaagcattttgtctttatttaaaaccgcgtcatcgtcagaaagcggcataagacggctttcttgggtgcagatgtcgatcggcgttgtcggtattgcggccattatcgccggctatgccgtgtccgcggatttattcggaggcagttttacgagcatgaatgaactgttttcggccatggtgtttattctcggctcggtcattatcggaacctatctgttttataaaggttcggtcagctttctggcaaatctcatccggaaatcaaaaggcgggtatctgaatgtcagtgaagtgctgtctttgtcatccatcatgttccggatgaagtcaaacgccgtcctgctgacgattattacgactctttcggcgctggcaatcggtttgctgtctttaagctatatctcgtactattccgcggaaaaatcggctgagcaaaatacagccgcggactttgcgtttgataaccaaaaggagactgactcatttaccgctttattgaagaaaaacggaattgaacacaaagtgaaaacaatcaagaccattcaagccggtgtcaatatgaagaacatcataaacggcgatatgaaaagctttcaacaagacccgtccagcttggcgctgccgattataagcgagaaagacgcagaagggacggagctttctgacggagaagccgtgtttaccggatataatgatatgatgaaaagatttctcgacctgaaaacgtcaggttccattgatataaacggaaaaacggataaaataccgctgacgtataagggcttgaagaacgacttcctcctgtcatatacatttacaagcggagggctgccgaccgttatcgtcacgcagcaggtatttgatcggatcgagaaagatatcgacccgtccattcagggaaaatcaaatcggtttttcggcattacactcaaacgtgaagaggacatccaaaaagctgatggtctgtttcaggcgcagcactattctgacggcgcgctttcacaatttgaaacggctgacacccaaaagaaaaacatggggctgatcatgtttattgtcggctttttggggttaacctttctgatcacctcaggctgtatcctttattttaaacaaatgggcgagtgtgaggatgagaaggctgattacacgatattgcggaagctcggcttcacaacgggggatctgctgaaaggcatccgccggaagcaggcgtatcatttcggcatcccgctcgttctcgggctgttccacagctattttgccgttcagtcaggatggtttttattcggaacggaagtgtggacgccgatgatcatcgtcatggcgctgtatacgctgctgtactccatcttcggcatgctgtcggtgctatactataaaaaggtcattcaatccgccttgtaaaacaagttgaggagcctccgcataagcggaggcttttttgtatgaatagaagaaagcgatttttaaaagaatagacatacgtcattttttcgcgcgggggagccttatgcagagatattttcaattgaaatctgaaacaggagcctttcatcttttttccaaggaacacattttcacgctgttgatcatcggattgctgggggcgggcgtgatcgtattccggaaaaagctcaactacggccggtcgaatcgcgttttccgctatgtactgttcattttccttgccgtgtcgcagatcagctatcatatatggctgctttgtcatcatgcctggtcgctgaaaacagctctgccgctgcagctgagcgacctttccgtctatttggcaatgctgatggtcatgacaaaaagcaaaaaactgttcgccttcctctattttgccggtttgggcagcgccgtacaggcgatggcaacacctgatttaggggcgtattctttccctcattttcggtacatcgtgtttttcgtctcccacggctgtgtttttcttacctgcctattcatggccgcttcagaaaggtacagaccgtcggcgcgcggactgtgggtgtctgtgctgatcgtaaatctgtacggggcgtgtgtcttttttattgatcgtgtgctgaatgcaaattacttatatttaatgaaaaaaccgaagaccgcttcgcttctgaatgttttcggaccttggccgtggtatcttctatcaatggaagcggcggtgatattgagctttttcattctgtatattccgttttggctgctgaggaaaagagcatgaggccggcctgtttttgtgaatccaatcatttgtaattttttcaacattccggcattatttttttcagattctgatgttgaaaaaagacgtccgcggcgatagaatgaatgtgctatgataacgtgttcgatacggagccgcggcttgcggtttccgttttttcatggggttttttatagagagagggggatcggtatgccgcgcgctttgaagatattaatcatcggaatgtttatcaatgtgacgggcgcatcttttttgtggccgctgaatacgatctatattcataatcatttagggaaatcgctgactgttgcgggggtggttctgatgctgaattccggggccagtgtggcggggaatttatgcggcggatttttgtttgataaaatcggcggattcaaatccattatgctgggcattatgatcacattggcaagtcttctcggactcgttctgtttcatcaatggcccgtttatatttggctgctcatcattgtcggcttcggttccggtatcgtgtttccggccagttacgccatggcgggagcggtatggaaagaaggcgggcggagagcttttaatgcgatttatgtagctcagaacgcaggtgtcgccgtgggctcggcactcggcgggatggttgcggcgtactcgtttacgtacgtgtttttagccaatgctatgctgtatgtgctgtttttccttatcgtatttttcgggtttcgaaatatcaaaacccaaaatgcgagccaggtttctgttctggactacgagcctgtcagcagcagaacgaaatttacggcgcttctcatattgagcggcgggtatgttctcgggtggatcgcctattcgcagtggtccacaaccgttgcgtcacatactcaaagcatcggtatgccgctttcattatacagtgtgctctggaccgtaaacggaatattaattgtcgccggacagcctctcatgggagctgttctgaaaaaatggtccggtgcgttaaaaacgcagatggtcatcggcttttgtatttttatcgtctcgttcggcgtgcttctcagcgccaagcaatttccgatgtacctcaccgcaatggtgattttaaccgtcggagaaatgcttgtctggcctgccgtgcctaccattgccaatcagcttgcgcctaaggggaaagaaggattttaccaaggattcgtcaacagtgcggcgacgggcggcagaatgatcgggccgctccttggcggcgtgctggttgatcagtacggaatgagcgtgctgctgttgatcctgatggtgcttcttgttgtcagcatcgcagcgacggtgctgtacgacaaacgcctgaaaaccgttaataaacaaaacgtccaagtgcgatgacgacataaaaaaaatcccgctgtttcggcgggatttttttgtttatacgaccggaagcacgttgacggcgtccttaacgtttaaatatgtctttaatgaagaaaagctggcatcaagctgattcattctcatggcgagggtaggcttgataccggtgataatcaattctgtgccgattaatttaagcaggtggtgcaatttgaaaatccggtctgcggtctgttcgtttacctcggccagacctgataagtctataattaagtaatcatctttagatgcggttaatatgtctgtcaaagttgtcacaattgaatcaaatcgttcttccgttaagtttcccactaacggcaaagcggagatgccgtttcggatcggaacaatcggtgttgacagcgtcgtgatttctgtgagggaatcctcaaggagcttttcgtattctttctgctctgtaatgtctttttgaaaaccgacaaaatagagcttgtcttcaacataaagaggatcaatgttgagttcattccaaaacggggtgccgtcttttttgacgtttttcagccgcaccgtgatcttttctttctgggttaagctctttctgattttcgcgacttgttgacggtcggtttctttgctttgcagaaatctgcagttcttacctaatatctcttcggaagagtagcctgtcatatccataaatccctgatttgtatatatgatgggattgtcctcaagagaggggtctgtaatcaccacgccgatgcgtgcgtgatcaagcgcctttttgataagctccagctgctccagttttccggatacatttgagtcagccatgtaaaacccccttttggccgtaaagctgcgcgctttttcagccgtgtttctcccctttttaaatgaatctacagtaaccgtagcataacatatgttctgattcaagcagccgaagtttgcaatttgtcattcgggcttgtcctcatatacactgaatatataaagggaaggcacatcatcgctaagtaagtgactaggtcattgtcactgggtgaaaaatgaatctaatgcatcaagcttaccgatcatgtgttcacatataatggaagaaacaagctttttactttcctgctcaatcgccggtatgtagatatcgaaaatcatcgtattcgtaagggggctggatggcctgaagtcgctttactaaataagggctttaggaaggtgatgaagatgctgcatcaggtaataattgcttgtgtaattggaggaatcatgggggttctcggtcatgtgaaaaagagaggcaggctggagaaacccagaatgacaaagcggtttatctatctcggttttttggaagatggttttatcggaatggctgcttccatcttacttgtcttatccgctgaccccgattcaggaattcaactcgtcatcttatccataatcgcaggctacggcggagaagctgttctcaggagctttgattttgtcagagaacaaaacagtgattcggccgaagcaaaaccacaccagcaaaaaaatcctccatcaaaataatatccccgctcatgacccgttccgggtacattcccattgtatacaaacctgcttgcacttatgaacagaattctataaaatacaggtaagattacggtagcgataagaacagtgaagaggagcagtaagaagcagattttgcaatcagagagttgacggccggtgcaagtcaatcaagtctgtttccgaactcgcctcagagttgcagcggcaaaaccgctgacgcataactgcgttaaaagtatcaagtgagtgcggctcaaaaccgcgctaacgagggtggtaccgcgggaaataaaaatctctcgtccctttttgggatgagggagtttttttagttttagaataatctgaatataatctttctcatcccgtcaatacttggactacatacgccgtattcaatcagaaggaggtttttacgttgagttttcagcatgaaaaaatagaaaagaaatggcagaattactggttggatcataaaacgttcgccgtcagtgaagagaatgacaagccgaagttttacgcgcttgacatgttcccgtatccttcaggagccggccttcatgtcggacatccggaaggctatacggcaaccgatatcctttcgcgcatgagacgcatgcaaggatacaatgtgcttcatccgatgggatgggacgcgttcgggcttcctgccgagcaatacgcgcttgacacggggaatgatccggctgagttcacaaaacaaaatatagataatttccgccgccagattcaatcgctcggattttcatatgattgggatcgtgaaatcaatacgactgatccggactattacaagtggacgcagtggatcttcaccaagctgtacgaaaaagggctcgcttacgtagacgaagtgccggtcaactggtgcccggcgctcggaacggtgcttgcgaacgaagaagtcattgacggcaaaagcgagcggggcggccatccggttgaacgccgcccgatgagacaatggatgctgaaaatcaccgcttatgcggacaggcttcttgaagatttagaagaccttgactggccggaaagcattaaagacatgcagcgcaactggatcggacgctcagaaggcgcaaacgtccatttcgcgatcgacggcactgatgacacgtttaccgtgtttacgacaagaccggacacgctgttcggcgcggcttatgccgtactggctcctgagcatgagcttgtggaggccatcacgacgcctgaacaaaaagaagcggtagacgcttatgttaaagaagttcaggcgaaaagtgacctggaacggacggatcttgcgaaaacaaaaacgggcgtcttcacgggcgcatatgccgtaaaccctgcaaacggagaaaagctgccgatctggatagcggattatgtcctcgcctcttacggaacgggcgctgtaatggccgtgccggcgcatgacgaacgtgattttgaattcgccaaagtgttcagcctgcctgtcaaagaagtcgtaaaaggcggaaacacggaagaagaagcgtatacgggagacggagagcatgtcaattccggctttctgaacggactgaataaagcggaagcgattgaaaaaatgatcgcctggcttgaagaaacgaaaaacggtgagaaaaaagtgacatatcgtctgcgtgattggctgttcagccgccagcgctattggggcgagccgattccggttattcattgggaagacggcacgtcaacagccgttccggcggaagagctgccgctgattctgccgaaaaccgatgaaatcaaaccgagcggaacaggtgaatcaccgcttgccaacattaaagagtgggtggaagtcactgatcctgaaacgggcaaaaaaggcagaagagaaacgaacacgatgccgcaatgggcgggaagctgctggtatttcctccgctttatcgacccgaaaaatccggatcagctcgcttcacctgagaaactggataaatggctgcccgttgatatttacatcggaggagcggagcatgccgtgcttcaccttctgtacgcgcgtttctggcataaattcctctatgatatcggtgtcgtgccgacgaaagaaccgttccaaaagctgtataaccaaggaatgattctcggggaaaataatgaaaaaatgagtaaatcccgcggaaacgtcgtcaatccggatgaaattgtggcgtctcacggagcagatacgctccgcctgtacgaaatgtttatggggccgcttgatgcatctatcgcctggtctgaatcaggccttgacggagcgcgccgcttccttgaccgcgtatggcgtttgtttatcgaggaaaacggcgagctgacgggcaaagtgacagaaggcgcaggcgaaactcttgagcgcgtctatcatgaaacggtcatgaaagtgacagaaaacttcgaagcccttcgttttaacacgggcatttctcagctgatggtcttcattaatgaagcttacaaagcgaatgaactgccgaaagaatatattgaaggttttgtgaagctgctttctcctattgcgccgcatttggctgaagaactgtgggaaaaacttggccacgaaggttcgattgcatacgaggcttggcctgcatatgacgaatcaaaactggtggatgatgaagtggaaatcgtcgtccagctgaacggaaaagtaaaagcgaaattaatggttccggctgatgctgataaagcagcgttagaacagctcgcacaagctgacgaaaaggtaaaagagcagcttgaaggaaaaacgatccgaaaaatcattgccgtaccgggcaagcttgtcaatatcgtggcaaactgaccgggcgaagcccctctcctacagagaggggcttttttatcaggcctctatcatagaaattgcaccgcgggctttggtatacttaacaccataaagatgaatgggagtgtcacacattgaaaataaatgaaatcagcacagccgcactggaagaaaaattaaaagcgggagaagagctgtatctgattgatgtcagagaagacgaagaagttgccgaaggaatgattccggaggccgttcacatccgcatgggggacatccctgagaagatggatgcgttagacaaggacaaggaatatgtatttatctgccgttccggaaaaagaagcatgaacgtttgtatgtatttacatgagcagggcttccgtacggttaatgttgaaggcggcatgctggagtgggaaggcgaaacaaagccgaagaaataacgctttgaagtgaaagaagaaaagggacgtgcgtctttttcttctttttttataaaaaaacgggaggcgaatcaggtgaaaccgatgatccgcgcgatgaaaacaaacgatatcaaacaggtccggcaagtcgcagaacgaagctggcatcatacgtatgaagggattattcccagacacattcaggatcagtttctcgaatccgcctatcaggatgagatgatggaacgccggctcttgcattctctgttctttgtggcagaagaagaggggcgagtgctcggttttgcaaatgccaccccggttcaaaaagacggaaatgcggagctgaccgccatctatattgacccggattgccagggaaacgggataggcacggcactccttaaagaatgcatcaggcagtccggcggggtaaaaaagctttatgtccatgcagaaaaagagaaccgcattgccttatccttttatcaagcgaaagggtttcaatgggtatgtgaatttgaagaagactttaaaggacacactttacagacggtcaaactggtactgaacatataaaagcatccggcccgcccaggaccggaacgcgaatgatcagtgataagccggaagccggtctttgtgcgcttcaaataagtcatcgcacaaagagatgatgtcattcatggaaagctcggcgctcgtatgcggatcaagcatggccgcctgatatacggcttccttttttaatgtaacggccgcttcgatggttaaaagctgtgtgttaatgtttgttctgttgagcgccgcgagctgctcgggaagttcgcctgaatagcacggcataatgtggtttttgacggctgtgcaaggcacttcaacgaccgctttcgccggcagattcggtatcagcccggtattcagcacattgccgccgaatgtgaacggtttgcccgtctccatcgcttcaataattctcgaaccgtattcttttgagcgttcatgcgtcaggttttggttgttgatgatgccgtctctcatcgtttcccaattgttgatttgttccgcgcatctcctcggatattcatcaagcgggatttggagttcatctatcagctcaggataccggctttttataaaatacgggtgatattcggcattatgctcagatgattccgttacgtagcagccgaatttatccatcagctcaaaccgcaccatgtccttatgtttcgtcttttgtttttcgcgtgcccgtcttttaatttcaggatataaatcaattccgtcttttttaatctccaaaagccaagccatatggttgatgccggcaatgcgttcttccgtcccttcgtgatccatgccgagtgagtcaaacagatctttggtacatacctggacgctgtggcacaggccgaccgttttgacatttgtatgtctgagcatcgctccggtcagagaggccatcggatttgtataatttaacagccacgcatccgggcagacctcttccatgtcttttgcgatgtcaaataaaacggggatggtgcgaagggaacggaaaataccgcctattccgacggtatcggcaatcgtctggcggagaccgtaccgcttcgggatgtcaaagtcaatgaccgtcgcgggtttatagcctccgacctgaatggcgtttatcacatagccggcgtgtttcagcgcctgttttcggtcatcgtaggagatgatggatatactcgtattgtagcggtctctcatgttttccagcatgagctgggattctttcagccgtacagcgtcaatatcataaagcgcgaattcaaatccgtttaatgcttcagtcagtaagcagtcccccaatacatttttggcgaaaatcgtgctccccgctccgataaacgtaattttcttcaacagaaattcctcccttttcttctcagcctttgaccgccccggaggacagccctgagataaaatatttttgaagcgccaaaaacaatacgaccatcggcagcatcgccatgatcgcggctgcggcgactaagtgaagattgttcgcgttttcgccgaaaaatcccgccatggccacggtcaatgtctgcaccttttgatcttgtaaaaagaaaatcgcaaattggtaatcgttccagataaacacgcaggaaattatgcagaccgttgcggtaatcggtttcaacaaaggaaacacgattgtataaaaagtcctgatcaatcccgcgccgtccatcctggcggcttcctcaagctctttcggaatggaagagcggataaaccctgaatataagaaaacggtcagcggcatatatgcagccgtattaatgagaatggctgcggcatgcgtattgatcagccccgcatcagcgaccatcttgtataaaggaaccatggaagtcaaaggcgggatgatcatgattgaaatcaaaaggccgaagacgattttgttcagctttgtatttcttctagcgagcgggtatgcggcaagcgaacccatgaaaattaacaaagcggcggaaacggctgtaatgatgatcgtgttcagaaaggattgcccgagagaggcacgttcccatgcttcacgaaaattctgaaatgaaaaggcggatggcagcgaccattttgaactgtagtcaccttttgcttttaatgacgtggtcagcaaaatataaaaggggacaatatgaacgcacgagataacggctgccaacagcgtaaaaatccgcattcgggctgttttcatgacatttccgtctcctttcgcttgaaatacacgagagccgaaaaactgatgacaagaatcatgacggacataaacacgccttgggcggcggcatatcctgcatcctgccgtttaaaatataaatcatacataaacgttgacatcgattgagaggaattgcccggcccgcctgcggtcagcgcgaaaatgacatcaaacagcttcagcccgccgatgatattgatgaccatgttgatggtgacagccggcatcaataaaggcagggtgatggtgaaaaacggctgaagacctcccgcgccatccatttttgcggcttcgtaataatctttcggaatgctttgcagccccgccaaatatacaatcatcgcaatgcctgcgtattgatacgtgttaatcatgacgataatccacgggtttgccgcagggcttgccaaggcgttgacaggaccgattcccagtgcgccaagcacatcattcagcgcacccccgtcatatgagaaaataaaataccaaatgtatcccataatcagcggactgataatgacgggcaagtagacgatcgttcttgtgagcgccttcatttttaagctctgattcaaaagcagcgcatataaaagtccaagcatattctgaaaaaaagtgcttccgatgccgtaaagcaaagtgtttttcacaacaagccacgtgtccggatctgtaaaaagccttttatattgagtaacccccacccattgatacgtctgtgagaagccgttccagtttgtaattgtgataaaagcgccttttacaaacggaaaaatcatgaaaataaaaaccgtggcaagggcgggaacgtacatccaccatagtgacgcggattttaccggcttttgatgttgaaatccttgggtttctcttgcaagatcactcattctttttcagctccccgtgaatcagattgaagccggagccgcttatattccctgccgagtttcgctgaaacttcagcgggggttaagatatcggccatcagctcctgcccggctgttcccatcacatcccacattccgttcggcaaataaaggcggtcaaaataaggctgcaccttaatatgctgatagcgcttatagtcatttgcgtagaaaatgtccgtttgcacattcactaatccggccggaagcgaggtcgcttcggcaattgattttgcatgctcgggtcgggccataaatgcgataaactgtttcgcttctttaagccgcggggaatccttgaatgccgccagcgtgtaacgttcgcctccgatccaaaccggcgcgtctcccttgtggacggccggggtcggtatgatgccgacttttaccttcggattgatttgagcgacatcttggccgagagtgccgccctgcagcgtaaaggcgattttgttttgcgccatcagttcaatgagctgggaccgtttcgccgtcacggcatctatattgagcaggttttccttttgcatctctttcagtttgtcagataaataggtgaagtgtgtccagcggaaggttccgtttaacagttgttttttgtaacggtgtgcgggatctgtgatgagaagcggtgcggcgagttgatcgtaatattgggcaaatgagcttttctcatagccggcaaaccagaagggggtgactgttccgccgcttttttctttaatctgtctcaatgccttcataaaatcatccattgtttccggcggttttattccgtatttttccaacaacgtacgattgtaggccagtccgtcctttgcctgattcagagggaaggcgtatattctgcctttggcgtctttgagcatgctgtttaaattcggatcgagccgcttcgtccaagacatgccgctgaggtcggcggtatattctccgtagcggattttggcccagccgtgtgtgtcgaaaagatcgggcatatcaccggccgccattctgaccctcatcatattttcgtagtcattgcctgggaaatgaacgtttacttgaatgtccggatgttctttttggaatgaatcagccaactttctgaatacggagcgttcgctgtctgaggatatggtggaatagactgtcaatgttttctgcttttctccggcgccgctctgttctgccgagcagccgggaagtatcatgcaagtaaaagaaagaaacaaagccagtaagcgtttcatcttttcctcctttaaatatgatataaacgctgcgggacacgtcacctcctttcttgtgagccgcagctttgtctgacaatcaatgaagtggggagcgtcacggccagcgggacggttctgccgtttaaacggtcgagaagcaatttgacacccgtccggcccatctcttccgtgtatacttttaccgttgataacggcgtgctggcgtattctgcctcatcaattccgttgaagctgacaaccgccgtatcgcgcgggacttgaagaccggcttcctgcagggcttttaaagcgccgacagccatcgaatcacttgcgataaaaaaggcatcggggagacttccgcctttgatggcttcattcatcagccggaacccttcgtgcatgctgtattcgccgatcagtacatgctccggctcggcgccggccatttgtaagaaagcggtcagacgcttatcctcaatcgttttattgctgtttacaccgtctatgacggtatgctcccgctctcggccgccgatataaccgagccgctggtaaccgagcgacagaagatgttctatcgccttttgcgctgcggcataaaaatccacgctgacggaatcgtagcgggcgggatcgggggtgccgttaacaaataccgcgtgcctgaaagcggcgctgatattcgtaagcgcctcgtcttgcaggctgccgatgacgatgacgccgtccagttcgtgaaacatatgctcttgaaaagaaccgagatggatagaagatgtgataaaaactttttgccgaaagcattcttcctcaatgccttttcggatcgccgaaaaataaggatcctgccgttcttcttccggtgacaggcagctgacaacgccgatcaggggcgctgaatcgctgcggctgcggttcttccgtttttttgccgacggctgatagcccagctcatcggcgatcctcagaactttttctctagtttcatcagtcacggccaaagagtcatccttattcaaaattctcgatactgtcgcgctggatacagatgcctgtaaggcaatatctttgagacggaccatttcgcatctcctttttactaaatatttactaaacagaaatgacctggttattgttaaaatgatattatcatacgagagtaagcgttttcaacaactattttcggttacttttagtaaaaatcagtaaaaaagaaaatctgtttttctctatcatatttcaattgaaccggaataaattgatagagaaaggagagggtgatgtgctgaagatagctgtttttgatgaggagcatgaaaaggatctgcagactgaagtcaatacatttttaaaggggatttctgatgaacagctcgttgatattaaatatacggtagcggcggcctgtgatcctgaaggtgagcagctttattgtttttccgctctcattttataccgaaaataaagaagcccggacgaaatgccgggcttcgttgttcattatgcttttttgacgcggggacttcttggtttttggtatttctccgcttgcttgattccttttctctcgctcgctaatgacttgtacagagacacgatcatcagaaggatcacgactgaaaacggaaccgcggcgagaatggccgtgttttgcagtgcggccagaccgccggaatataataataccgctgccacggcggactggatgatgccccagatgattttcacccggtttgacgggtctaaagagccgtaagacgtttgcattccaagcacaaatgtcgctgaatccgctgatgtaataaagaatacagcgatcagaacaagcgttaatacggatgtcaccattgtcagcggatagtggctgagtgcgccgaacagcatcgtatccgttgacattcccgcgacattgaatacgcctttctgctgaagatccatcgcggatacaccgaagatcgcaaaccataagaaagccaatatacaaggtgtcaccaataccccgattaaaaattcccggatcgtccggccccttgatacacgggcgataaaaatgccgacaaacggcgaccaggatatccaccaggcccaatagaaaatggtccagctgttaatccattcgcgcttttgaggatcattcggagacaagcgaaagctcatctgcacgatattttgtatgtattggccgatagaatcggtaaatgagttcataatcagcaccgtcgggcctgcaatgagcataaagatcattaaaatagccgcgagcgccatgttggtattgcttaagtatttaatccctttgccgattccgctccacgcagaaatcaaaaataacacggtcacgacagcgatcaggatcagctgaatggaaaatgttttcggaatgccgaataaataatgcagaccgccgttgatctgagtcgctccgagccctaagcttgtcgccacaccgacaacggtcgcaaacacggcgatacagtcaatcgctttgccgatcggcccgtttactttatcgcccaaaagcggtgtcagtgtgctgctgatcaaaccgggcgcgtcttttctgaattgaaaatatgcgatacataaagcgacaaccgcatagatggcccaagcgtgcagcccccagtggaaaaatgtgtaccggagcgcatcacgaaatgcttggggcgtttctgtttcacctgagggagagctgatggcgtaatggctgatcggttccgcagccccgtaaaataccaaaccgattcccatgcccgcgctgaaaagcatggcaaaccatgataataagccgaattccggtttttccccgggttttccgagttttattgtgccgatcggactcacaatgagaaagagacagaaaccgacaaatatagaaacgaccagcagataataccagccgaaagaatccgtaataaatttttgtgccgtatcagtgacttgctgcaggctgtcaggagaaatggccccccataaaaccgcagcggctgtgatgacaatcacaatccaaaaaacactggagatgttcttcttcaaacgttctcaccctctgactatttttttcaatacgccattttgttttagtatggtcgtacgattgcagatcattcctttcttcctattccctcaatcaggtgaaacaaaacgcagaaaactctatcatgtttttggtcaattatcaacggggacgctcaggtaaatgcgctttaaaccatttagagcgagcgtgagaaacgtcctgcattcaaaccggcgagacgccctgtgacaaaggctgaagtgatattgtagcccccggtataaccgtgaatgtcgagtatttctccgcaaaaatataagccttccatttttttagacgccatttgtttcggctcaatctcttttacggaaacacctccgcctgtgacaaacgctttgtccaaagaaagcgttccgtcagcggcaaccgtaaattgtttgcagtctttgacaaaagccctgaattgatccttcggcagttccgtaaagcttgtctgcggatcaagaccgttccgttccagaagaaaaagcaggtaccgttcctgcatccacggcttcagcgcatttttgagcgcttttttcggtgcgtctttcagttccttgtgcatcttttgaaataactcttcctcgttgatgccgggaaacagatcgatgcggagtttgacctctggctgctttttcagttctttgacgacaaactggctgcagcggagaatggcggggcctgacaagccgaaatgggtaaacagcatgtccatcacgtgtgtgacgattggtttgccttttttattcaggacgctgacggccgcgtttctaagagacagcccctgaagtgttttttgtttaataaacggttctgacgacgtaaccggcacttccgtcggaaagagttcggtcacggtatgaccggccgcttccgcccatgcatagccgtctccggtgctgccggtatgcgggactgattttccgccgaccgcgataatgacggcgtctgcgttaatgtgttcgtcattgtttgtcgtaatgcccgctgtcctgccgttctcgtaccgcacttctttgattttttcatttgtgcggatggtgacgttcagttgttttaatcggttcaaaagcgcatcgacaacgctttgcgctttgtccgtcaccgggaacatgcgcccgtggtcttcttctttcagctgaatgccgagtttttcaaaaaaggcgatgatatcttcattattaaattcggaaaacgcgctgtataaaaagcggccgttgccggggatgtgtttgatgatttcttcaacggggaggcggttggtcacgttgcagcgcccgccgccggaaatcgccagcttccgtcccagcttgtttcctttatcgattaataatacgtccgcgccttcttcgcctgccgcaatcgcagccattaaaccggacggaccgccgccgatcacaatcacgtcataatgtttcatctttcatcaacaactttctttttcacgtataataggcggaaatgtccgctttctgctattatagcgaaagaaagggaatccttaaacgtattttgttttttaaagagttttcccaaaaagtttcccgctgtaattattaccgtctaattgcccagttgtgttaaaatagaaaagttgaatcttcgtagaaaatggtgatgaggaaacatgtcaagcaaattgttaaggggcacgttcgtgctgacgctcggcacctatatatcgcggattttagggatgatttatctgatcccgttcggagcgatggtcggagcgacgggcggagctttgtttcaatacggatataatcaatatacactgtttttaaacattgccacgatgggatttcccgccgcggtttcaaaatttgtctcgaaatataactccaaaggagactatgagacgagcaggcggatgctgagagcgggaatgtcggttatgctcgtaaccgggatgatcgctttttcaattctttatatttcggcgccgttttttgcggaaacatctctcggcggcacgagtaacaacggacttacgattgaccacgtcgtttatgtcatccggatggtcagtctggcacttttggtcgtgccgattatgagtcttgtgcgcggttttttccaaggtcatcagatgatggggccgacagccgtttcacaggttgtggagcagcttgcccggatcatctttttattgggcgcaacgtatttgattttaagagtgatcaacggcggccttgtcatcgcagtcggatacgcgactttcgcggcgctgatcggatcattcggagggcttgtcgtcctttatatttactggaataagcggaagggcgatcttctggcgatgaagccgaatctcgtcccgtctgcgaacttaagttataaaaaaatgttcattgagcttttcagttatgccgctccttacgtatttgtcggactggcgattcctttgtattcttatatcgatacgaatacgtttaataaagcgatgattgcggcgggccataaggatatcagccaggacatgcttgcgattgtcaccctttatgtgccgaagcttgttatgatcccggtttctctggcgaccgctttcggtctgacgctgattccgacgattactgaatcgtttacgagcaggaattataagcttttgaaccagcagattaaccagacgatgcaaattattctgtttttggttattcccgccgttgtcgggatgtccgtgttatcgggcccggcctatacgtttttctacggctctgaaagtcttcgcccggatatcggacaggatatattgttctggtacgcgcctgtcgcgattctgttttctctgtttaccgtaaacgccgcgatcctgcaagggattaataagcagaaatttgctgtcgtgagccttttcatcggcgtcattataaaagtggtgctgaacgtgccgctgatcaagctgtttcagggagacggggccatcttggcaacggcgctcggttatatcgcttctcttctgtacggttttatcatgattaagcgccatgcgggctattcgtatacggtacttataaaacgggtcattttaatcgcagtcctgtccgtcgtgatgggagtcgcggtcaagctgactcaatggctgctcagtttctttgtaacataccaaagcggccaggtgcatgcggcgattgtcgtctttgtctgcgccgctgtcggcggtgcggtgtacatgtttgccgcgtaccgaatcggatttttacagaaaatgtttggaaatcgtctgccccgtgttttgaggagaggcaggcattccgcccattgagaaataatgaatagtccgcttatcgcgggcttttctttttaaaggagaggatcaggatgagacttgataagctgcttgccaacagcggattcggctcaagaaaagatgtgaaaaaaatcgtcaaggctggggctgtcatgattgacggagagccggcgaaagatgtgaaaacccatgtcgatccggaaaaacaggacatcacggtatacggagagccggcagactatcgtgaatttatttatgtcatgatgaataagccgcaaggagtgctgtccgctacagaagacagccgccagcagacggtggttgatctgctgacacctgaagaacagcgatttgaaccgtttccggcaggacgtcttgataaggatacggaaggctttttgcttctgaccaatgacgggcagctcgctcatcgcctgctttctccgaaaaagcatgtgcctaaaacatatgaggtccggttaatttcacctctgtcaccggaagacatcgttcatctggaaagaggcgtcgtcattgaaggaggctataaaacgaagccggcagccgttgaaatcattacagaaagcccggatgaaacggtgattcatttgaccattacagaaggcaaatatcatcaggtgaagctgatggcaaaggctgtcggaaatgaagtggcttatttgaagcggctttcgatgggggctgtttctcttgacccggatcttaaaccgggagaattccgcgagctgactgaagaagagctcgaaacgctgagaggcgctgaagtgtaatcgatatcagaaaagcccaaaacagatttgttttgggctttttatatagaggaacaaaaaacaaggcaaagacgctgctttgccttgcagcatgtcaggccgaaaagggccttatgtaattgttcgcttaagatgtaattttcactttttttcgtgttgtctcccacttgcctcggctaggactatgaacaagatcattgtatgctaacacatttaagtctcgctgaatggttctaggtgtaatgccgaattcatcaaccagttcctgtgttgtcacaaggcctttttcctggatgaacatgtaaactgatttaatccgagtcagcatacgatttgttgaaggtttcaaaaaaccactccctatcataagatcggatggacttgatataccacaactttcgactctaaaacttcgtacgaataagcaacaaaggatgacattctgttttttctcttttaactgcctccattatacacgatatggacaacatgaatctaggaataagcgcagataattttttccaaatgggtgccgccttggtgcattactatgcccggtccgcttttattattatggaaactgaaactttttttatacatgtccgtatgaaaacgggggagtgagaagtttgggagaattattgaatgcaaacattgtctgcgccggttatgctgacaggccgaaggtgatttctgatgtatctctgtcagtcaatgcgggtgaaattgccggtttaatcggagcgaacggcgcggggaaaagtacagtgataaaggcggttctcgggctttcccgggatatagaaggcggtattgagtggaatgattcatcttatgcttacataccggagcgtccgagtttttatgatgaactgacgctttgggagcatctcgagctgaccgggtcattgcggggcatggaaggggaagagtgccgtgaacgggcagggcggctgcttgaagagttttcgctgacgtctgtaaaacatgatttgccttccggtttttcaaaagggatgcagcaaaaattgatgctcatacaggcatttttggcgaagccggatatttacatcattgatgagccttttatcggacttgatccgatctcaacgaagctgtttaccgacatgctgattgctgagaaagaaaggggcgcggggattttgatgtgcactcatgttctggatacggcggaaaaaatctgcgaccggttttatttgctggatcagggcgctctgcttcttcaaggcacgttagaggagcttcaggaaaaaacggggagccgttcactgctggattgcttttattcagcggttcggagcagtcagcgatgaccgggcgggctttgttttttcaaaggctgtttcattattggcggtatcaatggaaggtgtttcagacggtcattgattggacggtcgcgctgtatatcgttcttcccgctgccgcatttgccgtttatcaatatgctgaatggctgaacggcagggggcttcttaatggagcggcaggagtattaggatggggctggctgtatgtattcagtgccctgctgttgtgcacgggttttattcatacctttttgctggaagcggatcacgtatttttggtgcatgcaaaacatctgatgcaaaagctgaaacggtacgcgcttttgtattcgatgttcctttcccttatcaaatggggtgcgcttgccgtattgttatttcccttatggcgccaatacggtgactgcaccttaccggcatattcgggtatgttttgctgtctgttcggcttccataccgcaatattagcggtgcaccgacacagaaaaaacagcaggcggacattcgggaatcaggcggcgggctggctgaaagtgatggttctgatggcgggtgcgttttttatgatcgtctttgccgccgaatggtattggctttggccggcgggatgtatattgttcatctgttccgctcttttgacttggaaagggacggagacattatcggcctttgaggaagaagtgcttgaggagaacaggcgcaagctttcactcgcggcctctgttttgatgctcagccatgatgtgcagctcccgaatggtaaacataaagggcggagcaagccgtttttatatcccggctcaaagcacatctttacaaaacggtcggcgtatacggcgtggaaagaattgttctttaaagtgctgattcgaaacggcgggtatctccggcagctttaccttttaaccgcggcttttacggctcttattctcgttcttccgctcttagtgaagccggcagtcctcattttgtttgcgatcgtcagccgctatgccgcgtcacttttatttgaccggatcacggataaaccggttttaagcggtatcaagagagacagtgatgactatttcagggcgcgaaacagcgcattaaccgtcattcaaatcatctgttccgcctggtgtctcattgccgcgattctttccgttctttatatgtgaaaatccctttccgaaaaaggaaagggatttttcttaatgtccgttcaaaataaaaagctgaataaaaaacagcacggcgaagatgatgactaaaggatggatttcgcgccattttttcttagctgctttaacaagcggatatgaaatgaagccgagtgcgattccggttgaaatactggacgttagaggcatcgccaaaatgacgagaaaggccgggaacgcttcatcaagctcattccagcggatattcgataccgcacccatcatcaggctgccgacaataatcagagccggtgacgtaatcgcggacacttccgataagacgctgacaagcgggctgaaaaacatggaaacggcaaacataacggcaatcgtcagcgccgtcagacccgttcttccgccggccgccacacctgctgaagattcaacgaacgcggtcgtcgggctggtgccgaagatgcttcccaccgttgtagcggtcgaatcagccaaaagcgctcttctggcattcggcagctgattgtttttgatcagtcccgcttgttcggcgacaccgatcatggtgccggtcgtgtcaaaaatcgtaacgagaagaaaagaaaacacaacggcgtacagaccgtgatgcacgacatccccgagggctccgaacggatttgtgattaaaagcccctccggcaggtgcgggaaggacatgaatcctttcgcgaaatgaatctgcccggtcaaaaaggcaatgacggcggtcagcgccattccgatgaacagagcaccgttaacattcagcaccatcagtacaatactgatgataagtccgataagcgttaaaatgacggcgggcgaatgaagatcgccgagtgcgaccagattagatttatcagccgtgatgattccggattggcgtaagccgataaaagcgataaataagccgatgccggtcgtaattccgtattttaaattgtccggaatcgcttctataagttgttttcttaaaggcgttaacgataaaataataaagatgactcccgcgataaaaacggcgctgaaagccgtctgatacgtaatgccgctgcctgtgccgacaacgtgaaaggcaagatacgcgtttaagcccatgccgggggcaatggcgatcggaaaattcgcagcgagagccatccataaagttccgacaatggaagcgataatcgtcgcggtgaacacctggtcaaacggaattcccgcattggaaaggatcaccggattgacgacaatgatatacaccattgtgaaaaaggtggtcaatcccgcggtaatttctctttttattgtcgtttgatgcttgtcgagatgaaacataagtacctccaatgacgaacattttttcaaaacatcatctatattattcgttttatcgacattttgcaagtctttatcaagaaaggggatttgtgatgaactgggaagttgaagtcatcagaaacaaagaagatctgatccgtgacacgcagaagtttttgcagatcaacagcgtaatggacgaatcaacagccggtcccggccggccgtttggagaaggcgtcaatgccagcctgacgtcactgctggaattcggtgaaaaagaaggcttcaccgtaaagaatcttgatggctatgcgggccatattgaatggggaacgggtgatgaaatcgtcggcgttctgtgccacgtcgatgtcgttccgcccggagacggctggacgagcgatccgttttcagctgatatcagggacggccggatatatgccagaggcgccatagatgataaagggccgacaatggcggcgttttatgcgctgaaaatcgtcaaagacatgcagctctctttatccaaacgcgtgagaatcatcatcggaacggatgaagaaagtgattggagatgcgtggatcactacttcaaacacgaaaaaatgcctgacatcggctttgctcctgacgcggattttccgatcattaacgcggaaaaaggaattatagatgcgtcactgcgcattgcaaaaagcgcttctgacaaagacgcaaaaaacgggcttctgtcattccgttcaggactgcgcttgaacatggtgccggatgcggctgaagcggttattgaaggggacggtcttgatgccgtgcacgcatatttcagcaaatggcttgagcagtcaaaaacacaaggtgaagcaatttcggaaaatggaaaactgacgcttcgggtatacggaaaatcatgccacgcgatggaaccggataatggtgtcaatgccggcttaaagcttgctgaatgccttaacggaacggagctggatggagccggaaagcactttgtcaaaaccgtcagtgactattttttaaatgatacacgaggcaaaaagctgaaaattgattgcagggatgacatcagcggagagcttacattgaatgtcggcacctttacatacagaaagggtgaggaaggagaactcggcatcaacatccgttatcccgtcacttcagacagcaatgtcatccgtgatgcttttacgtctgctgaagaattccggcttgaagaatttaaagacagcaaaccgcaccacgtttctgccgatcatccgctcgtaaagacgcttcaaaaggtttacgaaggacagacgggaaagaaagcggatctgatttcaatcggcggaggaacgtatgcgagatccctttcggcgggcgtcgcgttcgggccgctgttccccggccggcctgacagcgcgcatcaaaaggatgagtacattgaaatcgatgaccttctccggtcaaccgctttatacgccgaagccatttatgagcttgccaagtgataataaaaagggacgccgaaagcggcatccctttttatcattcaaatgaccataaatccgttgataaataacgttctcccgtatcggccgtcatacagatgacgatctgttcggaagggaggcgttttgcggtttcaatggcggcgaagcaggcggcgcctgaagacgggccgacgagtataccttcttcccgggccagacggcgtgttgtcgtatacgcatcttcatcagatattttcatgatttcatcgtaaacgtcctgattcagtatgccgggaataaatccggggcttgtcccgacaagcttatgagcgccgggttttccgccagacaggacgggagatcccgcaggctcggcgacatgaacaatcatatccgggaaaagctccttcagcgtttctccggttccggtaatggttccgcccgttcccgccgttgccacaaaagcaccgagcggtctgttgagctgctgaacggcctgatagatttcaatggcggtcgtttttcggtgggcatctggatttgcgccgttatcgaattgcatcgggataaaacttcccggaatctgttcggcgagttctttcgcttttttgatgctgccgggcattctttccgcccccggtgttaacacaacctccgcgccgtacgctttcaggaggttgatgcgttctttcgtcatcgtgtcaggcatgacgaggattgccttgtagccgcgcgccgccgcgttcatcgccaggccgatgcctgtgttgccgcttgtcggttcgatgatgacagagccgggttttaaatgcccgctgttttccgcttcaatgatcatattgtaagccgctctgtctttgacactgccgctcgggttaaacgattctaattttaaatagacctgtgctgcatgttctggctgaagacgattgagctttacgatcggtgtgccgccgatcagctccgccgtgctgtttacgattttcaaggccggctcattcctttctgtataaaacgttcggtacataatatcctatcataatgagcggacagggttctcctctccgcttatccgttttataataacaccataaccaaagagggggagatcctcgtatgaaagcttcattgccgcattattttatcggcattccgattccggctgacattgctgaaccgatttgggaagcagccaaaaaggagccggcgttatcattcaaaaaatgggtgcacccgcatgactatcatattacactcatttttctcggagccgcggatgaagaacggcttgcgaaattatcgtcgctgctcgcagatgctgcgtcggcagcgcagccgtttaccgtacagtttcagcatctggatattttcggcgaccgcagacagccgagagtgcttcaccttgagcccgaacggaatgaactgctctttgatttgcgggaaaaaacaaaacaggctgttttgaaagccggttttcaagtggaaaaacgcccgtatcaccctcatatgacgatggcacggaagtgggcgggagaccggccgttttctgacgatgtgccgtttgaaagcggcagggtgcaaagtgccgtcagccggttttccctgtttcagacccatcttgaccggtcgcctaaatacgaagaaatcgcacagtttcaattgacataaacaaatattcggagtggagaaatcacatggcacagatcatcaaaattcacgactgcatatccagatatgaacttgatccatatcattatatgaaccagtttatccggctgaagaaagaacgctgggaggcgcttcttgaagcgtttgaccggaagacggaagaaaaagaaacgaaaacggctgccggcggggaaaccgatcaagcgccggccaggaaaaaattttccttaaaaaagagaaaagaagaaaatacggccgatataaatgaaaagaggcaccaatggtttgatgagccggagggagaagaggcgctgttcgggaatcttccgtctcaaaagtctgagctcgcgccttttttcaaagatcagctgtatgactttcaattaaaatgggcgagctccacgctttctcaaaagtctgagctttcgcaggcggtcaaaagggacgggatgttaaaaatgctggctcaaaagctgcccgattcctattttgtgatgtatcatccggttcttcaaattcagcaggcgtccgtcgaactgagcatgatcatcatctcgccgctggagattttctgcgctgcttttatggaagcggaagaggacagcgtatatatcggatcaaaacaccgtttttgggaagaaagaggctccggcagcacgcgccaagtattgaatccgtctctcagcctgcaccggacgggctcggtcgtttcgcaaatcgtaaaagaaaagcaggccgacattcccgtgcggaagcttttgctcagcagaacgtcttatattgattatccggagccgccgtacgggctggaaatagctgataaacggactgccgcagagtggctggaaaagcagcagaaaaatacggcgccgatcaagcaccaccagctgaaggcggcgaaggctcttttgtcttacggcttgagcgattcaagccggagacaggaatggcttgattaaaacggacgtttgccggctgtctcttcatctatgaagcaggtgaaaacaaacgatgagtcaatggttttttattattaatccggtctcaggaggcgggcggggccggcgtgtctggaaatcagttcaaaaagagctgaacaggcgcggggtcagccaccgctcttttttgaccgggcatcccggacatgcggaggtgctggcgaggcagatttcaatgatgcaggatcataagcttaagcggctgttcgtcatcggcggtgacgggacgatgcatgaagtcattaacggactgaaaggaacggatcagattgagctgacctttgtgcccgccggttcgtacaatgacttttccaaagggctcggtattaagaagtcggcgcttctccaagaaatcaaaagtctgcaccgcccgctcacgcggaaattttttgcgggaaacatcaacttttttcatgacaaagcgcaatcactttattttattaaccacctgtctgtcggcttcgatgcctcagttttgaaggcaacggcgaattttccgttttcgcgcgttcttcggtttttgcgtctcggctttgtgatttacccgctcgcgcatttacatacggcctcggggtttcagccgttcagatttgtttgcacggcagacggccagaggcgtgaattccgcaatgtctggtttgtcattgcggctaatcacccttattacggaggcggcatgaaagcggcgccttcagcaaatccccgtcaaaaccgttttgatattgtcatcgcagaaaacctgtcctttttctcgctgtatcgttttttatgggcgatgagcttcggccggcatatcaaaatggacggagtgacgatgataaaggggaaggaattcgtttttgaaacagatgggaaaattccgtttcacgctgacggcgagctgatcggaacgacgccgtttcggcttatgccgggcggtgcgccgttgaaaataaaaacataataaacaaatgaaacccgtcaaatgtttcacggcaaagagcggttcgcggcataaatcttcagaattcacaggtgttcttgctagttttgcttgacgaagtttgtgctgtagcgctaaaatttataggacggctattgattagcatatgagactctcaatagctgtcttttttattctcatgaaattgtttatgacaggccgctccgccaatagagaaaggctggaggcctattctaaaatattttaagaaatgatgggttgaacattgatatgaactggttgggacaattactaggtagcgattgggagatcttccccgccggaggagctacaggagatgcatattatgcgaaacataacggccaacagctttttttaaaacgtaatagctcgccctttttagccgtgttatccgccgaaggcattgttccgaagctggtttggacgaaacggatggaaaacggtgacgtcattacggctcagcattggatggcgggcagggagctgaaggcaaaggatatgagcggacgcccggtggctgagctgctccgcaaaatccacacatcaaaagctttgctcgacatgctgaaaagattgggaaaagaaccgcttgatccgggcgcccttttgtcgcagctgaagcaggccgtctttgccgtgcggcaattttcgccgcttattcaggaaggccttgcttatttggaagctcatgtggatcaggtgcaattcggtgaaaaagtcgtttgccattgtgatgtgaatcataataactggcttctgtctgaagacaaccagctgtatttaatagattgggacggcgccatgatagctgatccggctatggatctcggccctttattgtatcattacgtcgaagagccagcgtgggacagctggcttgggatgtacggcatgaagctcacggaagggcttcggctgcggatggcatggtacatgttatcggagaccatcaccttcatcgcctggcacaaatcaaaaggaaacgacaaagcgtatcatgatgccatggaagagcttcatgccctgatgaagcggattgtcaagtagtcaggagtacgaatccatctgctccacccattgggacaaatggttttggtgctcctgaatatgcgtgtcgatggaatcggccgtgatgccggactggctgtagcggtagacatcctcgagcacgttttttatatttgaatcaagcccggtgttggccatcagtgatttgatgacgcgctccagctgttcatactcggcaaccgtgccgcagcaatccaattgatggtcggccagtatgtcctttaataaccggacctgatgttcgcttgttaagcccatgattcatatacacatcctttctgtgtcatacattgtgcaaagcggtgcggttttatgcatcacatgagtgttccggaccggggagcctctttttttatgcagccggcgcctttaaaaggcgcttgcggctctttatgtttcatggtatgttgttactcgaaattatagatagaggtgtcaatcatatgagaatgcgccataaaccttgggcgaatgattttctggcagaaaacgctgacatcgccatcagtgatccggcccagtataaagggcggtggaacacggtctttggcaatgacaacccgatccatattgaagtcggtacgggaaaagggcagttcatttcaggaatggccaagcagaatccggatatcaactatatcgggattgagctgtttaaaagcgtcatcgtcactgccgtccaaaaagttaaggacagcggggctcacaatgtccgtttgttaaatatagacgcggaaacactgaatgacgtatttgaacggggagaaatcaagcgcgtatatctaaacttttctgacccgtggccgaaaaaccgccacgaaaagcgccgtttaacatttaaaacgttcttgaaaaaatacgaagaagtgatgggcgaaacaggtgagattcattttaaaaccgataaccgcggtttattcgaatactctctgaaaagcttttccgaatacggcctgcttctgacggaagtcagccttgatctgcacaacagcgatccgaagggcaatattatgacagaatacgaagaaaaattctccgcgctcggccagccgatttaccgggccgaagttgaatggagaacaaaagacagactctgatgcgggagtctgtttttttatgccgccatttgctaccattacatcaggagggatcaagatggagacattgaatattgggaatatttcattaacatggctggacggcggtgtaacacatatggacggcggagcgatgttcggcgttgttccgaagcctttatggtcgagaaaataccccgtaaatgacaaaaaccagattgaattaagaacagacccgattctgatcagaaaaaacggcctgaatatattggttgacgcgggtatcggccgagggaagttctctgataaacaaaaaaggaattacggcgtaacacaggaatccaatctgaaacaatctcttcgtgacctcgggctttcctgtgaggacattcatattgccgcgatgacccatcttcattttgaccatgcatgcggcctgacggagtacagcggagaggagcttgtctctgttttcccgaatgcccgcattatcacttctgcaacagagtggcgcgaaatgagaaatcctaatatcagatcgaaaaatacatattggagagaaaattgggaggcggtacaagatcaggtcgaaacctttgaaaacgagtatcagctgacagaaggcattacgatgcaccacaccggcggccacagcgacggccacagcgtcatcgtcttagaagacgaaggggagacggctgtgcattttgccgacctgatgccgacgaatgcgcataaaaatccgttatgggtgctggcctatgatgattatccgatgacctctattccagaaaagcagaaatggcagacgttcgcggcagaaaaagacgcctggctcattttctatcacgacgcgatttacagagcggtaaaatggggagaagatggcgaagtggccgcgtctgtcaaacgggagaaaaaataagcggatcgatgatttgcctgtatgaatttcgggaataaaagcaaacctaagacaaattgctttgaaaggaagagacaggtgaatcaatttcaagtgacgaaagatggagaaatcaaaacaacactgcgcggattagaagtgctttctacgccttttttaaataaaggggtggcctttacacaggaggaaagaaaggaactcgggctcgagggatttctgccgccgaaagtattgacaatcgaagagcaggcgaggcgggcctacgaacaattcagttcgcagcctgatgagctgagcaaaaatgtgtacttgaccgctctccatgatcggaatgaaacgttattttacaggctgttaaatgatcatttaggcgaaatgctgccgatcgtatatacgccgaccgtcggcactgcgatccagcgttacagccatgagtacagaaaaccccgcggtctgtatttgtcaatagatgaccctgaaggaatgcgcgccgcatttcagcagttcggaaaaaatgaaaacattgacttaatcgttgccacagatgcggagggcattctgggaatcggtgactggggcgtcggcggcatcgccatttctgtcggaaaactcgcggtttatacggcggcggccggaattgatccgtcacgagtgcttgcggtcgttttggacgccggaacaaatcaggaaagcctcttaaatgacccgctgtatgtcggaaaccagcattcaagagtgcgcggcgagaaatatgaccgctttattgatgagtatgtctcgcttgcccgggaaacattcccgaatgcgctgcttcattgggaggatttcggtacggctaacgcccgcggcatattaaaacggtataaagataaagtctgtacgtttaacgatgacattcaaggaacgggcgcggtatcgcttgcagctgttttagcgtgtgcaaaagcatcaaaagtgcctttaaaagagcataaagtcgtcgtcttcggcgcgggaacggccggtatcggaattgctgagcagctgcgcgaagccatggtgcatgacggattaagcgaagaagaatcctacagccatttttggtgtatcgacagaaacggattgttaacggatgttatgaaggacttgcgtgattttcaggttccgtacgcgcgccctgctgatgaagtgaaagagtacggccgcagcggtgaaggcggatcaattgatctggcggagactgtgcgtcaggccaagccgacgattctgatcggcacatccaccgtatcaggcgcatttacggaagaaatcgtcaaagaaatggcctcgcatgtcaaacggcccgctattttgccgatgtcaaacccgacgacattatcagaagcaaaacctgaagatttgattaaatggacggaaggccgcgcgcttgtcactacgggtagtccgtttccgcctgttgcgtataacggcgttacctaccatatcggacaggcgaacaacgcgctcgtattcccgggactcggactcggcacgattgtgacaaaagcaaggctcattacggacaatatgttcgttgcctgcgcgaatgccatcgccggtatggtggacgtcggcaagccgggggcgccgatgcttccgaaagtggaggatctcaggacggtatcggcaactgtggcggtagctgtagctaaagctgccattcaggacggtgtagcggaaaaggaacccgaggatctgatccaagcggtgcaggacgcgatgtggcaccccgtatataaacgaattcggccgatgtaaccgaataaagcccaaaacgctgatggttttgggctttattttttgcttgtccgaattatgaggcgacagaatcaatgacatcgacaatctggcctgtttttgcattgaccataacttcatattgctccagttcgccgaatgccgaacgtgtcacgccggttttgtatacctggatggtttctccgtttacctggtagggctcgggctctgtgtaaatccatgatccgtctatcggcccgcgctgtttaaaagccgctttcacgatacggagcgctttttctgaagagatataaggtttcatcgcatactttttcactgcgatggcagcgcataatccgactcctgcacctaagagaaaatgacgtaatttcaatatgaagcacctccaattatgtcgtagtttttattatacagaagatgccagacggtgttaagtaaagcggcggttttccagcccattcaatctgagcgcttggaaaacggttgtttttctaataaaataaaagcattacatagaaatgaggggaaaatatgaatgaggaaacgaaaacgcttttccggacgctgacgcagcttcccggcgcaccgggaaatgaacatcaggtccgctcctttatgaaacgggagcttgcgaaatatgcggatgacatcgtgcaggacagactcggaagtgttttcggagtaaggcgcggcgctgaagatgcgccgaccgttatggtagccggccatatggacgaagtcgggtttatggtaacgcagattacggataacggcatgctgagatttcagacgctcggcggctggtggagtcaggtgctgcttgcccagcgcgtcgaggtgcagacggataacggaccgattatcggcgtcatctcaagcatcccgccccacattttaacggatgcccagcgcgcaaagccgatggagatcaaaaatatgatgattgatatcggtgccgatgatagagaggacgcggtcaaaatggggatcagaccgggacagcaggtcgtgcctgtctgcccgttcaccccgatggccaacgagaagaaaatattgtccaaagcgtgggataaccgctacggctgcgggttaagcattgaactattaaaagagctgcacggaaaagacctgccgaacaatctgtacgccggggccaccgttcaggaggaagtcggtttgagaggggcgcagacagcggccaacatgattcagcctgatctctttttcgcgcttgatgccagcccggcaaatgatatgagcggcgataaggagctgttcggccgtctcggcgagggggtgctgctccgcattctcgacagaacgacggtcatgcaccgcgggatgagagagttcgtccttgatatggcggaaacgcacaatatcccttatcaatatttcgcttcaggcgggggaacggatgccggacgggtccacatatcaaacagcggggttccgtctgccgtcatcggcatttgttcaagatacattcatacaaatgccgctatcatccatgtcgatgattatgccgcggcgaaagaaatgctcattaagctggtcatggcgagtgacaaacagacggtcgaaacgatcagagaaaatgtgtaaaaaaataagcaggaccgcataaaggcggcctgcttattctgtttcaaataaataagagagtgctttcatcgcttgattgacggtttcgaccgtgatattcgcttttccggaaagctctttcagcggatgatgaagttctttcggacggatgagaatgagcggctttccttttgcgatggcataagaagcatccatcgcggtattccactgcttatatttctcgccaaacagggcgatcacaaaatcggctttttccatcagcacctctgtacggaaattgttgatatcagaagctctggcgtcttttaaaacagaatcgggctgcacgcccataatctcttctccgatattgtctgagcgttcatggttttccatcgggccgacaaacgtaatcggcaggtccagcgctgttgctttttgcttgatctcgtcccgccaattactgtggatttcacccgctaaatacacgacaaactgcatcttttgcccctccttatgtacatattcagattttcgtacggttacaagcaaaatggtaaacgaaacttgcttgataatgcaaatgaaatatgataatgatattgcatatagttggtcttgctgtaaacagtctggtatgatccaattggacaaacatcagcatataaaaaactcataatccagatggaggaatgacaatgaaaaagattgaaagcacggaagaattgcaaaaagcggtacaagacgattgggcggtatttatgttttcagcggattggtgcccggactgccgctttgtggagccgtttctccctgagctggaagcggactttcctgaattcacttattactacgtagaccgcgatcaatttattgatacatgcgcggaatgggaaatttacggcattccgagctttgttgtgtttaacggaggaaaagaagtgaaccgcttcgtcagcaaagaccgtaaaacaaaagaagaaattgagcaatttttaaccgattcccttgctaaagcataaaggaggccacgggctttgaaaatgacgtcaaggaagctggcggatttattaaaacagcgcctgcagcacgagaaccgatccttcttttttgacagagaaaaagacaccctccgtgttgaggatcaaacgaccaaaaaaggcatcacattggagctcccgcctatcattgcgaagtgggagacgaaaaaagaagaagcgatcgacgaaatcgtctactatgtgtcagaagcaatggaggcgatggaaggcagcggacaggagatgtccggaaaggaagccggaatctatccggtcatccgctccacatcatttcccgatcaaacgagcgacggcattccgctcgtgtatgatgaccatacggccgaaacaagaatctactacgcgcttgacctcggtaagacgtaccgcttaattgacagccgtatgctcgagaaagaaaactggacaaaagaacggatcagggagacggcgtcattcaatctccgctctcttccttcagttgtgaaacaggatacggttgcagacaattatttttattttttcagggcgaatgacggctatgacgccagccggattctcaatgattcgattcttcatgaatacaagcaggccgctgaaggcgaattggcgatttccgtcccgcaccaggatgtattaatacttgctgacattcgaaatgaatcgggttatgatattttagggcaaatgtccatgagcttctttgcaagcggcacggtgccgattacggccctttcatttctgtataatgaaggcagactggaacctgtgtttatcatggcgaaaagccggccgaaaaaggattagaaaggatttttcttatgaacgctttttacaataaagaaggtgtgggagatacgcttctgatctctcttaaagatgcggcacgcgaagaaatcgcctatgaaaaagaaggcgatgtcatcagaatctttaacaaagaaacaaaagaaacgacgggctttaacatttttaacgtgtcttcttacttacagattgaggacaacggccccgtcgctttgtctgagacattcgttcaggatgtgaatgaaatactgaacagaaacggtgtttcagaaacgctgacagttgacctttctccgaaatttgttgtcggtcacgttgaatcgaaagaaaaacatccgaatgcggataaactgaatatctgccaagtgaatgtgggagaggaaaccctccaaatcgtttgcggcgcgccgaacgtggacaaagggcaaaaagtcgtcgttgctaaagtcggcgcggtgatgccgagcgggcttgtgattaaagacgctgaattaagaggcgttccgtcaagcggcatgatctgctccgcgaaagaactcgctttgccggatgcgccggcggaaaaagggattcttgttcttgaagacagccgcgaggccggcgaagcatttcaattctaactcccataaataagcgcacagaatcgaatgatgtgagagaaagccgttaagcatgcctgcttaacggctttcttcagttgggagcttaatcttttctgagccgcccggcaatggtatactaaatatcgtcccagactactaaaaagggagttagagagtgattaaacatgagttggctgaataaattttttgacttatttttaggtgaaaaagaagaagagcatgaacgtgaaccaaacacgcatgcccaaatcccgaaacagcagataccggatcagccagaaggcaaattcacgcgcatggaagatcctaaaatatattacgaatatccgaaagggaatttccgcttccctgtcgttccggacggctataagcgaacggagcaaaaccaaagacagcgggaaaggcacgaacgccgccagccgtcccgggattatgccgccgggaaggagcaaaccgagcggaaacagcatacacataaagagcctgatacggtgaaaaagccctttaaaccgtcatccattccttcaccggtttacggctttcaatctcagcacagcataaaaaaagcgcctatatccgaaaagcggcgtgaagagaacgtaacattgctgtcagaggagcaatttgttccgccaaaagccggtcaggaaacggaaaaagagcccgtcttcacaacatccggcataacaaaacagacgaatgaccggccagaaccgtttgcgaaacaagaaacggaagaaatcccggccgttaaaaaagaggagcttcacaccgaggctgagaatgcaaaagagcaagtgtttgcagcagcagaaccgcagcagactgaagagcgggagcacacggaaagcgcggagtctgccggctttacagaagaacaagagcatgaacaaacccgcccgcagcctattaaagagcctgagtatgaagcatcccgaacggctgaaaacacagaggaacaagcggcgccgcaggaggaacatcaggagcctgagccggaaaaagcaccgccttttgaaaccgcagaagaaccggtgtatacatacacagaacccggatacgatgaggaagttcagccgcagtctgaagacaagcccgaatcagctgaaaccgacgcggaacaggaaacagactcgcagcctgagtacaatgaagtcacgcggcattcagacccccccgagcctgaacctgcaagcatcaagacggccgatgccccgtcccggcctgccgaagaaaaaacggagcatcacggacagcctcagcctgtgaaaaaagcggagcagccgaaagagcgcaatgttccgtttaacgtcatgatgcttaaaagtgataaacacaagcagacgaagacgccagagggcggagcgagctatgcctttccgaatctgtcgcttctggacgtaccgccggcgcaaagacatgacgaccaatcgtggattgaagaacagcgcgagcttttaaacgttacactgaaaaactttaatgtgcgcgcccaagtcgttcatgtcacacaaggcccgtccgtcacacgttttgaagtgcatcctgagcccggagtgaaagtaaacaaaattacaaacttagcagatgatattaaattgagcctgtctgccaaggatattcggattgaggcgccgatccccggtaaaaacacgatcggcattgaagttccgaaccgcgtaagcaaagtcgtcgatttaaggcagatgatcagaagcgccgctttcaggacgaatccgtctccgcttacagccgcgctcggtgtcgatatttccggaaacccggtcgtcattgatttgaaaaagatgccgcacgggttgatagcgggtgcgacaggatcgggaaaaagcgtctgcatcaataccattttggtcagtctgctttataaggcggatccgagtgatgtcaaaatgcttctgattgatccgaaaatggtcgagcttgcgccttataaccaaattccgcatttggtcagccccgtcatcacggacgccaaagccgcgaccgccgcgttaaaatgggttgtggaagagatggaacggcgatatgaactgtttgcccattcgggtgtgagagatatcggccgctttaatgaattaaccgccgatcataagacaggcgaaaagcttccgtacctcgtagtggtcattgatgagcttgccgatttaatgatggtcgcgccgaacgatgtggaagaaagcattgccagaatcgcgcagaaagcgagagcctgcggcattcatctgcttgtcgcgacacagcgtccgtctgtcgatgtcattaccggaatgatcaaggcaaacataccgacgaggattgcattctccgtctcaagccaggtagattccagaacaatcatcgacatggcgggagcggaaaagctgctcggaaaaggcgacatgctgtactgggaaaacggtaccggaaaaccggtgcgcctgcagggcaactttgtatccgacagagaaattgaccgcgtcgtctctcatgtcagaaagcagctgccgccttcttatttgtttgaacaggaagaactgatcaggcagggaaccgccctcaaggaagaagacgaactgtttcctgaggcgtgccaattcgtcgtggagcaaaacagcgccagcacctcaagccttcaaagaaggttcagaatcggttataaccgcgccgcgaggctgattgacatgatggaagccgaaggcatgatctcagaagcgaagggcagcaaaccccgtgaagtgctgattacggccgctgacattgctcaagaataagaatatcgttcatttttctcacaaacatggtatgatagtggatggaccatcaaaactgcatcactgtcacgcgctgaaatatcatgcggcaggtttaatcaaaaagaaagttacagatactgacgataacgtaaaaataaatggaagcgccgctgtgcgggctttttgcccgcggcggtcgcaaaatgaaatgagcgtcatatactggggaacagatagacgtttgttggaggtacgattatgactgtttatcattttgttggaataaaagggacaggtatgagcccgcttgctcaaatcctgcatgatacagggtatcaggtgcagggatcggatatcgagaagcagattttcactcaggctgcccttgaaaaaagaaatatcccgatctatccgttcagcgccgataacatcaaacccggcttaacggtaatcgccggaaacgcattccctgattctcatccggaaatcgcaaaggcgctcgctgaagggattcctgtcatcagatatcataaatttttagctgaatatatgaaaaaatacacaagtgtcgcggtaacgggcgcacacggcaagacgtccacaacgggcctcttggcacacgtgatgcagcaggcgaagccgacttcgtttcttatcggggacggaacgggcagaggaaatgaaagcagcgaatactttgtatttgaagcctgcgagtaccgccgtcatttcttgagctatcagcctgattatgcgattatgacgaatattgattttgaccaccctgattatttcgccaacattgacgatgtgtttgatgctttccaaaacatggcgcttcaagtcaacaaaggcatcattgcctgcggtgatgacgagtacctgccgaaaattcacgccaatgtgcctgtcgtgtattacggcacgggagaagaaaatgattttcaagcgagaaacatcgtaaaaaatacggaaggcacgacatttgacgtctttgtccgcaatacgttttacgatacgttctacatcccggcatacgggcatcacaatgtcctcaattccttagcggtcattgcaatctgccactatgaagagatagacgtgaacatgattaagcgcggacttgaatcattcggcggcgtcaaacgcagattcaatgaaaaagtgatcggcagccaggtattgatcgacgactacgcccaccatccgactgaaatcaaagtcacgattgaggcggcgcgccaaaaatatcccgaacgtgaaattatcgcggtatttcagccgcatacgtttacacggacgcaatcattcctggatgaattcgcagaaagtttaagcgcggccgatcgcgtgtatctgtgcgacattttcggctctgcccgcgagaacgtcggcaagctcacgatcacggatcttcaggaaaaaatcgataacgcagaactcattgaagaaaatgacacatcagtgttaaaagcgcatgaaggcgcagtgctgatcttcatgggcgccggagacattcaaaaatatatgagagcctatgaaaacgtcatagcgtaacgaaaaagcagtggggctctcactgcttttttgcgcgtgctgcaaagggatttaccgagaaacggagaaatagtatacatacagatctttcatatatgtttatcattttaagaattgggtatataccactatatcctgcattaaggaggtattagatgatcatcattctttacttaagcgtcgcactcattgccgttgcatttctcatcctcgtcatctatctgtccaaaacattaaagtccgtgcagatgactttaacaaacgttgcctcgactttagacggccttgaagggcagatgaaaggcattaccgcagagacaaccgagctgttacataagacaaaccgtctcgcggaagacattcaggaaaaatcagagaaattaaatacggttgtccatgctgtccaggaagtgggaacttccgtccagcagtttaatacatccataaagcaggcagcaggttccgttacggcctctgtaagagagaatcaggataagatcagtcaggttgtcacctggagccaggccgctatggaaatatgggacaagtggaagcaaaagaaaaaaacatcgctttaatcataagaaaaatccactaaggaggaatcataatgagcaaagatggaatcaatagtaaggattttttaatcggaacgctgatcgggggaattatcggcgcgacaacggcgttgtttctggcgcctaaatcaggtaaggagctgcgcgacgatctcggcagtcaggcttctgcgttaaaggataagacggacagaatgacggccgacgcgaaagaaaaaggctctcaatatgtcagcatcgccaaagacaaaacatctaatatcacccagctggtagctgatcagtcaggccagattatgaataaagtgaaggatttaaaagaccgttctaagagcacactaaccgagaaagccgaagagacgagaagcgaaatgcaggacacggcccaaagcatcaaggccgaagcggaagacgccggggaaaaagccggtcaggcaaatcgctgatcttcaataaggagagataaccgacatgacaaaacagctgatatcgtctgaagaagagttcaaaaatgccgctgagaaagaaaacacgctcgtgtttttgaaacacagcacaacctgcccgatcagccaagccgcctttcaggagtttgacgcctttgcatcggcgcattcggaagtgccttcttattacctgcaggtgcaggacagccggccgctttcaaactatatcgccgagacatacggcgtgaaacatgaaagcccgcaagtattcgtcattgcaaacggcgaagtgaaatggcacgcgtctcattcacaaatcacaaaaaacgcaatagagcagcacctttcataattgctggccgccggttgataccggcggttttttttttgaaaaaaactattgatcatttcagccggatcatgtaggatatcaatatataccgcttcaacgcataaaagcttaaaagcgtttttgtgataaagccgaatgtgaaaaaatttattatttcatattcctattttcgcataactgtagtaagatgcatgttaaccattaaaataaaacatagcatagaagggatgaaaaagatgagcaacaaggaattagagagcctaagacagcaggcagacgcactaaacttagaaatccttaaattaatcaatgaacgcggagccgttgtaaaagaaatcggtaaagcaaaggaagcacagggtgtcaaccgatttgaccctgtcagagagcgtacaatgcttaaccgcataattgaaagcaatgacggcccatttgaaaactcaacgatccagcatattttcaaagaaattttcaaagccggacttgaacttcaagaagaggatcacagcaaagcgttgctcgtctcccggaagaaaaaagcagaagatacgatcgttgatattaaaggtgaaaaaatcggtgacggcgatcagagattcatcgtcggaccttgtgccgtcgaaagctatgagcaggttgccgaagtcgcggccgcagcgaaaaaacaaggcattaaaatcctgcgcgggggcgcgtttaaaccccgcacaagtccgtatgatttccaaggtctcggcgtagaaggcctgcaaattcttaaacgtgtcgctgatgaatatgacctcgcggtgatcagtgaaatcgtaacgcccgcccacattgagcaagcgattgattacattgacgtcattcagatcggcgcgcggaacatgcaaaactttgaattgctgaaagccgccggttccgttaaaaagccggtattgttaaaacgcggtcttgctgcaacaatttcagagttcatcaatgcagctgaatacatcatgtcacaaggaaacgaccaaatcattctttgtgagcgcggtatcagaacgtacgaaacggcaacgagaaacacactcgacatttctgccgtgccgattttgaaacaggaaactcacttgccggtgtttgttgacgtcacacattcaacaggccgccgcgatctcctgcttccgacagcaaaagcggcgcttgcgatcggcgctgacggcgtgatggccgaagttcaccctgatccttccgttgccctttcagactctgcgcagcagatggatatacctgaattcgagaaatggctgaacgaattaaagccaatgctgaaagtaaaagcataatacaacgttccgctctttaaaggccgccacgcgcggcttttttttcgtatcttcattttatttaattataaaatgaaagtgaacgttttcatcactgggaaaaacgtgtataatttcatgagagatatttaaatttgatgaataatgaaaaataatgtacactactgacttacgcttacaatcataaacgacagaatgcgaaatcgtacgacatttctttacataaagtgtttatgctatagataaggataagtgtatccagtaaaaggagtggtttcagtgagcaacattacgatatacgatgtggccagagaagcaaatgtcagtatggcgactgtttcccgcgtcgtgaacggcaacccgaatgtaaaaccgacgaccagaaaaaaagtattggaagccattgatcggctcggctatcgcccgaatgcggtggcaagagggcttgcaagcaaaaaaacgactacggtcggcgtcatcatccctgatatctcaagcattttctactctgaacttgcgcgtggaattgaagatatcgcgacgatgtacaaatataatattattttaagcaactcggaccaaaatcttgagaaagaactgcatctgttaaatacgatgcttggcaaacaagtggacggtatcgtatttatgggcggcaacattacggacgagcatgtcgaagaatttaagcgctctcctgtgccgatcgtcttggcggcatcagtggaagaacagggcgagacgccttctgtcgccattgattatgaacaggcgatttatgatgccgttaagcttttcattgataaagggcatcgcgatattgcactcgtctccggaccgatgcaagagccgatcaaccgttcgaaaaaactgcaagggtacaaacgggcgcttgaagaagcggcgattccgtttaacgagcaattcgtagcggaaggcgattacacctatgattccggtatggaggcgcttcaaagcttgatgggccttgaccggaaaccgacggcgattctttctgcgacggatgaaatggccctcggcattatccatgcggcccaagatcaaggtctttcgattcctgatgatcttgatattatcggttttgacaatacgagattgagcctgatggtccgccctcagctttcaacagtcgtgcagcctacgtacgatatcggcgccgtggcgatgagacttttgacaaaactgatgaacaaagagccggttgaagagcagatcgtcgaattgcctcaccgcatcgaattaagacaatcaaccaagtcataaaaaaacggaaaagcaagcttcactctgaggggtggaatcttgcttttttacttgagtaaggagaagatatgaaacgttttgattatctgacgcccgttggctttatgttaggctgtattattgtcgcaatcggtattctgtcagggacgggactggcgggaatcagttcatttttagatctgacttcttttttaatcgtcacaggcggccttgctgcggcgatctttatcagctttccgccgagggatttaaagaaaaccccttctgtactgaaacaggtattctcccgtcaggatgacaatgtgaaagagcttgtcagagtatttgtcagcctttcggagcaggcgcgcaggcaggggcttctgtctctggatgaccaggcgcgtgagatcaaggatccgtttttaaaaaaagggcttttgcttgcgattgacggctgggacgaggaaacgatccggctggtgatggattctgagatcgccgcgatggaagaaagacacagaaaaggaagacgcgtttttgaaaaagccggtgatttcgcacccgcctggggaatgatcgggacgctcgtcggactcgttctcatgctcaaaaacttaaatgacccgcataccctcggaccgaacatggccgttgcgctattgacgacgctgtacggagcgctgcttgccaacttggtatttatcccaatcgcggcaaagcttgaagaaaaaacggaaagtgaaattttcatcaaacaggtcatgatcgaaggggttgtcggcatccaatcgggcaaaaatccccgcaacctcgaaagtcagctcgtcgtcttcagctcaagagaagactggcgtaaaggacagcctgcgaacaagaaaaagggcgctgtccatgaagcttagaaaagagcgttttgaaagaagaaacaaaccggaacattccggcggttcaccgagatggatggtgacgttcgctgacttgatcacgctcattctcgtgttctttatattgcttttttcgatgtcgcaaatagacgcggaaaaatttcaatctgccgtttcatcgattcatacaaaaggcagcgggggtgaaccggcgtcatcagacaaagcaaacgaaaataaagaacaggatttgctgttacaaaacgtgaagacatacataaaagcgcatcatttgagttcgaaattgacggcgaagcgcgatgagcgcggagtggttctggtgctgcaggaggccgttctgtttcagacgggaaaagcggatgtgctgaaaaacgccgagccggttctgcatcagatcgcggtgcttttaaaaacaattccgaatgacatacaggtagaaggccatacggacagccgccggatttccacctatcaatttccgtcaaattgggagctgtcgtctgcaagagcggcgagtgtgatccggtattttaccgcgaatgaagacttttccgccaaacggtttatctctgccgggtatgcggatacgaaacctgtgaaggacaacaaaagtcccggacatatgaaagaaaaccgccgtgtagaaattgtgatcaaaaaaacgacctcctcataaggtcgttttttatttagttttataccgctgctcagaccggatggcaaaaagtgctttttccacggtttgggcatttttttctgaaatttcttctttgcggggaatcggaggatataattgttcaggatcactccaaaaagcgggcaacgtgcagggggagtgcttctgccatttatcaatccatttctgcggtatgcgctccccgggatcaatccctttcatctcaagccaaatgcggctccacgctctcgggacgactctccaaatatcgtatccgccgccgccgaccgcgatccatctgccgctgcaatattgatgggctaatgaatgagcaagccgcgggatctcctgataaatggagattgtattggacaggtgtgtcaatgggtcgtaataatgggcgtccgcaccgttttgggtaagaatcacatccggcttgaaaaaagccgcgatttctgaggcggccgtattgtaagcgtgaagaaaggaatcgtcctctgtgaaagcgtccagcggaatgttaaaagaatagccgtagccttgcccgcttcctttttccagtacttgtcccgtcccgggaaataaataacgcccggtctcgtgaaaagaaacagtgcagacatcagacctgtcgtaaaacgtaaattgaacgccgtcgccgtgatgagcgtctgtatcaatgtataacacttttgccccgtagttcttctggatgtattggatggccacggcgctgtcattatagatacaaaagcctgaggccctgccgcggaagccgtggtgaaggccgcctcctaaattgcaggcgtggctagcttgtcccgtcatgacataatcagccgccgttaaggtgccgcccaccagaagtgacgcggcttcatgcatgccggcaaaaacgggggtgtcttccgttccgagaccgtagctttctccttctgcggcagggagccggcccgcacccgctagttccaccgcctgtatataatcctccgtatgaacgagagccagctcttctttagcggccgtgcgcggtgtgacgatatctccttcgtcaaacgcatccgccgcctgaagcagatcgtatgttaaaagcacacgacgctgattgaacggatgttcctgatgaaattgatacgtctgataagaaggcgagtaaacaaaaacgctgtctctcatggctgatccctcaaatgtttcggccataagacattgtatccggcttcttgaacggcacggataaaagggagcggattcatcgtcttcacccggaagacgagaatgttcgacccggcggaatcatggggatagacgagcacactcaggatttgcagctgaagatcacggcacatgcagctgagatcagcaaggctttttgtcatatccgtcaccaggatttccacctgtgatcccggctgggccgcgcctgtcaggctgacgaaagtccggagcacgtcggttttcgttaaaatgcccgtcagcttatggtttaccgtaatcggcagacagccgatgccgtgctcataaaaggaagcggatatttcttctacaaagtcaagcggatgagcgcagatgacattccgcttcataatggtctccactttgtttgtcagaaatgcgccgcgttccttttgttcaaagctgccggggccggcctgtttaatgtctctgtctgtgacaataccgatgacgtgcagctcgtcgtcgatgacagggagatggcggatatgatatatcttcattttacggacggctgtttcaatggagtcgtgttttgagacggtgatgacgtcccgtttcatgatttgttctgcaatcatctttttatcccctttgtatgtcagtcaatacataaatcgctgataaaaacgaagcctgtcgaactgttcaattgactcctgactgacgtgcctgccgatgcgggccatcagacaattggccggatgagagctgatttccggttcatccgttgcgaaccagacaagacccccggcattcatcatcttttccatgatctttctgtattcccacacatcttttttcattccttttaaatcccaatgccagtaatattccgtcgtcatgatgatgtaccgttccatctgttcatccatcatgctgactgtcagcaaagtttttccgacagaacagcccctgtagccgggagcgacctcgatcgccccgagttcaaggaggtcttccatatttccgtcagaccaccgttcaagcggatcaggatataaatacgtcacatagccgataatcgtctgtccgtccctggcaataatgatccgaccttcaggaagcccggcgatctcgattaacgctttgtgctgttcatgaggaaggcgaaaggctgtcaggccttcatgaaactcatactgtgctaggtcctctggaggaacgggcccttctactaaaagagggccggctgctgtctgaattgatgaagaatggtacgttttatgatgtttcactgattcaccgcctgtcggttcttaataaaaacacatctcttttaagcataacaaaatataaagcgttttcaatagtgttgtaatttatattttaaaaattgagaaaactgtgaacatctactataattagtctatagataagcaaagggggatgttgcatgaatttgaaagcgttgccggcggaaaaggggaattatcatctgcgaaattatgaggaaacgtaccgcagcttcgattggaaagaggtcgaagcggcattttcctggcatcagacggggaagctgaatgcggcgtacgaagcgattgaccgtcatgccgaatcatttcgaaaaaacaaagtagcgctatattacaaggacgcaaaccgggatgaaaaatacacatttaaagaaatgatggaggaatcgaaccgggcgggaaatgtactgagacggtatggaaacgtggaaaaaggggaccgcgtttttattttcatgccgcgttcgccggagctttactttatcatgctcggcgcaattaaaatcggtgcgatcgccggtcctttatttgaagcgtttatggaaggcgccgtcaaagaccgcctcttgaacagccaggcaaaggttgtcgtgacgacacctgaactggccgaacggattccggcggacagcctgcccgacctcgagcatattttcattgtcggcggcagcaaagaaacgggagataaaatcattcattatgataaagcggctgagggagaaagcacgagacttgatattgaatggatggacagaagagacggctacctgcttcactacacatcaggatctaccggaacgcctaaaggtgtgctccacgttcatgaagccatgattcagcaataccagaccggcaagtgggtgcttgatcttaaagaagacgatatttactggtgcactgcggacccgggctgggtgaccgggacggtgtacgggatatttgcgccgtggctgaacggagcggcgaatgtgatcgtcggcggcagattcagtccggaaaactggtacggcacgattgagaagctcggtgtcagcgtctggtacagcgctccgacggctttcagaatgcttatgggcgccggagatgaaatggcatccagatttgaccttacttcacttcgtcacgtcctgagtgtcggagaacctttgaaccccgaggtcatcaagtggggacataaagtattcggcaagcgcatccacgacacgtggtggatgacagaaacgggcggacagctcatttgcaattatccttgcatggagatcaagccgggttcaatggggaaaccgattccgggagtggaagcggcgatcgttgacaatcagggaaatgagcttccgccgtaccgaatgggaaatctcgccattaaaaagggctggccgtcgatgatggattccatttggaacaacaaagagaaatatgattcttatttcatgccgggcggctggtatgtttccggagattctgcttatatggatgaagatggttatttctggttccaaggcagagtcgatgatgtcatcatgacatccggcgagcgcgtcggcccgtttgaagtcgaaagcaaacttgttgaacatccggcgattgccgaagccggcgtcatcggaaagccggaccctgtccggggagaaattattaaagcgtttatcgcgctcagagaagggcatgagccatccgatcagctgaaggaggacattcgcctctttgtaaaacaggggcttgccgcgcatgccgcaccgcgggaaattgaattcaaagataaacttccgaaaacacggagcggaaaaatcatgagacgtgtgctaaaggcgtgggagctgaacctgccggcaggcgacctgtccacaatggaagattaaagacggcgttgacatcgtatcttatttatgttaaaaatgagtaagcttcatacgaaaaggttttgattgagacaagtagggtatctgattgttcaagagagctgatggccggtgaaaatcagcacataagatatgccgaatacactcatgaaccgcttttgcgaacaaagccattccaaggctttcagtagtgaaagaacggacacggtccgttatcaaaaagagtgataaaagcttttttatgcttttattagtagggtggtaccgcgattatatcgtcccttcgttttaaacgaaggggcgttttttattttcataaacaaaggagcagacaaaatgactaatttattagaggatttatcattccgcggcttaatccagcaaatgacggatgaagaaggactgaataaacagctgaacgaagaaaaaatccgtttatactcagggtttgacccgacggctgacagcctgcacatcggacaccttctgccgatattgacactgcgccgtttccagcttgcaggccaccatccgattgcgcttgtaggcggcgcgacgggactgatcggcgatccgagcggcaaaaaagcggaacgtacgttaaatactcaggatatcgttgtcgaatggtcgcaaaaaattaaaaatcagctttcccgatttttagatttcgaggccggagaaaaccccgctgtcatagcgaacaactttgattggatcggaaagctgagcattattgaatttctccgtgacgtcggaaagaacttcggaattaactacatgcttgcgaaagatactgtaagctcaagaattgaaaccggaatttcttacacggaattcagctacatgatcctgcaatcctacgattttctgaatctgtacagagaaaagaactgcaaactccaaatcggaggcagtgaccagtggggcaacatcacggccggtcttgaactgatcagaaaatcagaagaagaaggggcgaaagctttcggtcttaccattccgctcgtcacaaaagctgacggcacgaaattcggcaaaacggaaggcggcgccatttggcttgataaagaaaaaacatcgccgtacgaattctaccagttctggatcaatacagatgaccgtgacgtcgtcaaatacttaaaatactttactttcttatcaaaagaggaaattgaagcttatgctgaaaaaacggagacggctcctgagaaaagagaagcgcagaaacgtctcgctgaagaggtgactgttcttgtacacggccgcgaagcgcttgagcaggccgttcatatctcccaggcgctgttcagcggcaatattaaagagctttccgctcaagacgtcaaggtaggatttaaagatgtaccttcgtttgaaaaagaccgctctgaagaactgtctttagtagacgtgcttgtggaatctaaattgtcgccttcaaaacggcaggcccgcgaagacattcaaaacggagctgtttacattaacggcgagcgccagacggacatcgggcatcttctgactgcggaagaccgcattgaagatcaatttaccgtactgcgccgcggaaagaaaaaatacttcctgatcacgtactgaaaataaaaagcagtccggccgctcaatgcggcaggctgcttttttatgttttgtgaatactgcacggggaaatgagtacagtacatagtataagcaaaacagggaaggggtgctgcgccgtgaatttcatgtttaccatcgcaaaagaaagattgcagcgggatcattgggaacagcagcaaagcataaacgccgaagccaaagccgaggaatcagagacggaagaagaaaatccgacatcataaagggaaagcctccattctgcggaatggaggcttttgattgtcaccatatcagcctgacggcggccatcagcacgactcctgtgatgaccgtgatggataagctttttgtccgcatcgcgcaaagcaatgtcgggatgagaacgatcattgctttccaatcaaaggtcaaagcgctgtttgttttcacaatcatgctttccgttaccagagccgtcaaaatgcaaagcggaataaaggagagccattttaaagccaactcaggcatctgaatgttccggacaaatataaacggaacaatgcgcggcacaagtgtaacaatcatgcagccgagtataatccagatcatttgtgtgctgatgctcatttgtccgtcaccaccccgatcgttgccacaatcacggttgagacgatgaccgcgatgtgtgacgggacgaaatacgataacaagaccataaaaatgatcatatagagaattaaggagaggctgtgcttcagcttttccgaagcggacgattgcaattgcagcacaagcagcgccgcaaacatagcgggcaaagcaaagtccaggccgagcgcgtaaggatcagatatccattgtccgagaagcccgcccatcacgcaggaaataacccagcacatgtaagcggttatattgaggccgttcatccacttatcgtataacctgccgttctgagccgctttgttcaccgctactccgaaagattcgtcagtaagcaaagccccgaagccgatatttttcgccaaagagtatttcgtgaaatacggcgcgatggtcaggctcagcagaaggtgccgcagattgacgataaacgtcgttaaaataatggcggaaatcggactcccggaaacaaggagcgagcaaataataaattgggcggcgccggcatagacacacaaagataacaaacaaatttcaagaatgcttagatgagaggcaacgccaacgatgccgaaagcaaaaccgatgctcatatagcccagcagcgtaggcacacaatcccgcaccccctgtaaaaacgtatcgttcatttcccgggaaacggcggttttttgcacttctgtgttaatcattttttatactcctttcatagagattataatgataacgactaatgaaaaaatcaaagaaaatacggttcacatttatatgaaccgatttccggtgacgacatgaaataacgaatggttttgtttcatcaggccttcaactttctcagccccgacttctttcacaagctccgcgaacatcagatcgtgcctcatatattccatggccacgagaacgagagcgggatcttctgatttaatggcccaggcattcgtctgcggagaaaaattggcgattaagacttctttattatcgcgggcagctatcgttaatcttccgcccatccgtttctccgccacttcaggagacatattatgatttgtcgtatttccgagcttcacttccggagggccgaacacaatcgaaaagacgggcaattgttcggcggcgcgtttgttagcggcttcttgaataaagggaatctgctgttcccagacagacagccacaactcttcctcggctttttcaatcatatccttcatctcattgatgacatgatcattcgtgctgatgcggcggatgacattcatctcctgctcgctttccagtgccaataacttttcctcaaggtagccgaatgagctctcgaaatcgtgccggagccggtcgattaattcctttccggcaagcggagcatatgtaaccggatcagacggcacaatatggacagcgcctttatcaactaatttccccaatacttcatagatcattgagcgggggacgcctgaccttttgctgatttcatatccggtaacaggcgagtgtttcaacaagccgatatatgctttacattcatattgagaaaatccaaacttctgtaattctttcagaacatcctccataaacatcctccgtagtggttattcatgaaactactataatgtaagcggttatatcttgtcaatgggacttgagtgctgaaagaaagatgcgcctgttttgtcgctttccaacttagtttatggtgagttacatgtatggcttttgtgaaaaacgttgccgtagacccacacgaatgccgtttgatacgataaattcaagaagttaaaaagaggaggatcacggtggaaaacacctctaaaatcgcttttttatcggttataagcaattccctggtcgtcatgctcaaaatagtggtgggtataataaccggatctgtcgcgatactttctgaagccattcattcttttttagatttgatcgccgccttcattgcctttatctccgtcaggatttcaaaaaagccggctgatacagggcatccgtacggtcatggaaaagtcgagaatctgtcggggactatcgagacgattctgatttttgcggcagggatttggatgatatatgaatgcgttcaaaaactggtgaacccggcgccggttcatctgcccgtattgggaattgttgtgatgcttgcgggggctctcattaatttgatcgtttcgaagttcgtaaaaagagaagccgaaaaggttaattccgtggcaatgaaatcaaatgccctgcatttactgactgacgtgtacacatcattaggcgtagcggcaagtcttttggtcgttaccgtaacggagtggtacatacttgatcccattataggtatggtgctggcggtgtatatcatatatgaagcgtttaagttaatgaaagaagcattcccgccgctgattgatacccgtttgtcggaagaggaagaaaaaacaattttaaagattattgaaacatttcaacaggaatttattgaaattcacgattttcgtacaaggcgctccggcccgcaggagtatattgattttcacctggtcgtagcctctcacgtgacgattaaagacgtgcataacctgtgtgaccgcattgaaagagatattacgaatgaattcaaacaagcacaggtaatgattcaccccgagccggagagcgagaggaagaaataaatcgatcttaagtttgcttttgttcccggcaaaatgcctgcaaaaggcccgttcccacgggtctttttgttgtataaatgactatttctcgctcatatgagagataagcttatacacgtgaggggttcatttcatacgttatgttgtaaagaaaaagggaggtgaacagaattgaacgctatttctgttaaagaaattgaacatggagttgccgttgcggaaagagaaggtttaggggagtatttataccaagaaccggtttctaaaaaatgttcgcgccgttcccgcagcagaaaacggacacaccgttctcgcagcagaagacggacgcatcaccggacacaccgttcccgcagcagaagacggacgcatcaccggacacaccgttcccgcagcagaagacggacgcatcgccggacacaccgttcccgcagcagacggtctcatcaaaaacgtagccgcaaacgctgttttaaatgctgactgcagactctattacaagtaacggggatctgctataatggcaagagaactgcataaaagatccagtatcatcatctgcggacactgaactgacaacatggcgctgtttgttcgtgtccgttttttatgttaaaaaagatgccggagggtaaaaaggaagggatgacgccgaatgaagctgaatgaggatttttataactctgaaggaaagacagtctctttgccaaacatcagcagcaagcttttgcatatcacggacagcgggcatatcagcgttgacttcatcagcataagcaggctgcggaaggcttcaaaaatcgcgatcttaggtgacagcgtcgcccgggggctgcgtgcggaatacggctttggtgacattctgaaagaccggacaaacgctgaaataaccaatctgtctgtcagcggcgttaatatgagcaacaacggaagcgataacatttatcagcaggcgcttaaaacaaagggacatgatgtcatcattgtccagggaacagatgatgattggtgcaaccacattcccatcggcacagatgaaaaggatatcaccacattttacggaggcttctgccaagtgattcagcagctgcgaagcggaaataaaggcgcgagcatcattgtggtgaccccaacgagacaagcaaaaatgtcaaaaggaaaaatcgtccgccgtgatactgataaaaataaactgggcctgaagctggctgactatgtgaaagcccaaaaagaagcctgcacactcctctctgtaccatatgccgatctatttgatactgatctcatcgacccatataatcccgctttccgcagcatgtgcatgtcagaaggtcttcatccgaacgagaaagggcatcaaatcatatttcaggaaatctgccggaattattattactattatgggtaacacagcgctaacagattattttcggctttgcttttctaaaagctcaattattctttgagatgcgtgtttttgcgctctcaaaagcgagacgatattaccggtaaaaccgattaaaatgataagcagcaaaatgatcatccacatagcgaacctcccgtcgggttttaaaacattctctttttattttacttatgatggatgggccggagaatagtctaacggatggtgttttttgagagccggtgaaaagtccataaaaaaagcacagactaaacgggtctgtgctttttttctcttatttcagcaggttcaatgattcacgattaaaggcttccaaatcgtcaggtgttctgcttgttacgatgttatggctcacgacgacttcttcatctttataatgtgcgccggcattgattaagtctttgcggatgctgcggaatcccgtgatatcttttcctttaagaaggtcggtatcaatcagcagctgcgggccgtggcagatcgcgaaaacgggtttctgattttccacgaatgctttagtgaattcacccgggcggtcatctccgcgcagaagatccggtgaaaagcctccgggaatcaataacgcatcgaattccttggcgtctgcgtctgagatcgcttgatcgatctttactttctcaccgtgcttgcccgtcacttctttcccagcttccaaatctattgtcaccacactgtggcccgcttctttaaatgcttccgccgggcttgtatattcaatatcctcaaattgatctgtcatcagaactgcgatttttttgctcatacatcatgcctcctgtgaatttgtatatgacaagaatatcaggcagattcccgcctcacaacgtatttgcttatgaaaaaagacccctctgaaaaagaggagccaaaaggtacggaggtctgcttaaacttacgtgtttaacctgagataaggcaagaaatcgaaccaattactttttgcgtctttttttctgctttttacacccgcatttccccggatcgcccggatcaatgacttcgtgaattgtttcttccttataaacgtggcggggaacataacggatatgctctctgttaatgtgtttgatgggatggacgtaaaccacttctttgtcagtatacttgtcagtcacaatatacttagggtcacagtaatacactttcgattttttacccattcatctcacctcccgtactttattaaatgctgacaaggaggattttgcatcggacaagtacaccatggcaagtccacaatttttcagctgcaatttcgtttttctgatttttcctgaatccgcctcaaattggaacggctaaccctttttgagcggggaaatctataaaaaagaattcaaaaacgattcttttctcaggtcaatcgagatgtatacatctttagggggatttttagaatgctcgatgaaaaaacgattgaaatcattaaaagcacagtgccggtcttagaagagcatggtgaagaaatcacaggccgattttatgacctgctgtttcagcatcaccctgagctgctgaatatctttaatcagacgaatcaaaagaaaaaaacacagcgtacggccttgtcgaatgctgtgattgcagccgcagccaatattgaccggctggaaaacatcgttcccgtcgtcaaacaaatcagccataaacaccggagtatcggtgttaaacccgagcattacccaatcgttggaaagtacttgttaatcgcgataaaggatgtgctaaaagacggggctgctcctgaggtcattcaggcatgggaaaaagcatacggcgtcattgcagacgcttttatcggaattgagaaggacatgtatgaacaagcggaaacgcaaaaaggcggctggaaagactataaggcgtttaaaattgataaaaaggtaaaagaaagcaaggagataacgtcgttttatttaaaaccggaagacggacaagttctccccgagttcaaagcgggacagtatatcagtgtaaaagtatacattccggacacgggttatacgcatatccgccagtacagtttgtcggatgtatccggtaaggattattacaggatttccgtgaaaaaagacggaattgtttcttcatatctgcatgaccaattacacgaaaaggattcaattgagatcagcgctccggccggggatttcgtattagaccctgattccaaaaagaatctggttctcatcagtgccggtgtcggaattaccccgatgatcagcatgttaaagacggttgccaaaacccagccgcagcgaaacgttctctttatccatgcggcaaggagcggagagtatcatgcgttgcggcatgaagctgaagaagccgcggaacactcatccgttgacaccctctttatttacagcgagccgtccgaacaagaccgttcagaaaacattcgttttcgggaaggccggattgacaaacagctgttagaagaagtgatgacagataaagatgctgatttttacctgtgcggatcaccgtcattcattaaagaaatgaaaaagctgatttctgaattcaatacaccgccggaatccattcactatgaattatttgaaccgcagctgagtatggtgtgattgaagaaggaaggacgatgattttaatgtatgaagcatccggactgggtgctttttttattctcttgcaaggaagggttgctgaggaatcactctgtagaggaaaaccactttttgtctcaactcgcttaattatcgaatgaaataagtgccgcatgttaaaaacatatggcccgcgagtttattgctcacttatcctgctgctcggatttttggtgtgtgagaaaaaaacggtacggttgcataatccggaagagacgctgaccttttacttgtaaaagaagtttaaagacaggatgaacgcttatttgctagtgtacgagcggcaaaagcaaaaagaggaatcggtattttaaaattaaaaataacaactgatagaaatgaaagtttcaggatacaatgggatttatatattcgggttttgtgatagcagtatagggaggggaataatagagtgagtaacttttttgaggaatcggtacagggaggggttgtatctatgcttactgatattaaacaaaaggtttggggatgctcttttatctgagaatcgatttgagatgaagcggggatgccgaggggatcagagggcgaacgtcaggcagaattacgccaagtggaccgccgagaaaaatggctctggaaatgtgaatctattgttgattttcttgagtgagctactgaagaaatagttgacgagaaacaccggactgtctttgtagtagacggggtgaaatatcgtgaaatcgctctgcattctggcgtttcccgcgaaacggtcagacgcatcaaagagaagattttttgccaaatatgtaatttttattgttgaaacagataaaatccgcagtgtagactggaaggcaaaatatttctgcgtccccatcgattcaaatagggattacaataatgtgaagagttatttataaacagaaattgataaataatataagatcagctgacaaacttaatgaggatcaaactagtgctcacttatttataaattaaacatattataatgatatattaatcattaagggagatgagcagctgatgggttatgatcagcatagaagatgccctaaatgtaaacaaaaactaccgaaaccaaactgctgtaagtgctgtcccatctgttatacaaaagttattgtaggacaacgaggattacgaggggtgcgagggattccaggggttacaggaccagccggaccagtcggagccacgggaccagccggaccagccggagcgaccggggccacaggagctatcggtccagccggatccaccggagcaaccggggtaactggagcggcgggagtcacaggagcgaccggggtaactggagcggcgggagccaccggagcgaccggggtaactggagcggcgggagtcactggagtgaccggggccaccggagatatcggtccaaccggaccagccggagccacaggagtgaccggggccaccggagctatcggtccaaccggagtcacaggagcgaccggagccaccggagctatcggtccaaccggagtcacaggagcgaccggagctatcggtccaaccggagtcacaggagccacgggagcagccggagccacgggagcgaccggggtaactggagcggcgggagccacaggagtgaccggggccacaggagctatcggtccaaccggagtcacaggagccacgggagcagccggagccacgggagcagccggagccacgggagcgaccggggtaactggagcggcgggagtcacaggagcgaccggagctatcggtccaaccggagccacgggagcgaccggggtaactggagcgacgggagtcactggagtgaccggagccacaggagatatcggtccaaccggaccagccggagccaccggagccaccggagccacgggagcagccggagctaccggagcgaccggggtaactggagcgacgggagtcactggagtgaccggagctatcggtccaaccggagccacgggagcgaccggggtaactggagcgacgggagtcactggagtgaccggagccacaggagatatcggtccaaccggaccagccggagccaccggagccaccggagccacgggagcagccggagctaccggagccaccggagccactggagcgaccggggtaactggagcgacgggagtcactggagtgaccggagccacaggagctatcggtccaaccggagcaaccggagccacaggatctgggctatcagaatatgcttatgtgtacaatctaagtgcagaaacggtagctatagaggctccggtaatttttgactcaactggaatcactactgctggcattacacatgcccctggaacagctcaaattatagtaaccactccaggagattacgaggtcactttttcagtctcgggtgtagagcctaaccaattcactttatttgtaaatggagggccggtgacgaacacagtttacggttcaggagctggtactcaacagaacaatggtcaggccataattactctagcagcaggtgacattcttactcttgtaaatcatacttctgcagcagcagttactcttcaaactttagcagggggaacgcaaacaaacgtaaacgcttctattgttctcaaaaaattaaattagataagtggtttaaatctccatattaaacaagaaatgagaatgacttaaaaaagcttatagagcttaatatacagctttagaaggatgaagaaatttaaaatataagcaaactcatctaatttttttatataaggtattatggtaataggtaataaacaggcaggcactttcccgcaggggagggtgctttaaatttaaggacaaaagcctccaactgttaagcgagtcaacacagtaggaggcttttctcttatgggtggtacagcagcagtattctcttacaaatcaaatattcccagaaagttatggcagtattcgtctctcgagtaatgaaaaaagttttatgttctctgtaaactgcgtccggtaaatctcgggataaacgattggcggttaacgactgagtacgggggcagtttagaaagaatatgattggagggattacataaaataattagtcaagccttagaggaattaggaaagaatgtgaggtgtgcggctgaaagggtgccaaatctcaaccctgttattatccataaaaaagacatggcagcgcaactacaggaattcagttcggatttaggcttgtcagcagatctccatcattgcctagataaaaaggtaaagaacttattaacggcgtatatggctcacaaacggcatatgcaatccatgattcctgacggcatttagggttaaaacaaaagcaaagcgcgaatctctactaaacagttactttaggacttctcaaaaaggaactcctattaaagggagcagggttaattttcaaattgtttaaataaaagtaaaaatatagcatgatagaccagaaaacaaatgaaggaggatttgtatgaggttgttaaaaaactcaatctgtttacttgtcgcaactctattgtttgctattggattttcgccgcaaacgaaagcaacacaagagcactcgtttggattagcaaaaccagtaacctttgaagaaaaagaaactttaacagtagataagaatggagtggctaagagcaataatgatggccaggcttccatcattaaggaggcacgacaacttgccaaacaggatagccacaatgaaattacctataagaaccccttagctaaagaagaaaacaacattgttaatgtgccagtcgttgagaaaaaagaagagaaagcgcacactaaagcagctagcttagttacgatgtcctacacaacaatatatgaccccaacaaaaaatccacacaaccacaattaaaatagcaagcatagttggcgaaaagccgatagttatcgaagcaagaaacgatttatatgaaagtaacacttatagcggaaaatacggaagggtttttctccataacagagaatttttaggtaaaaatattaaagcaggtaaatcatactcaaagtcatattatcctaaacagacaaagttgatccaaagtggaattggagttcattcgatattcaccatgtgcttccgctaaagtatggaggaaaaaataactttaataatttgtatcctctccctcgtgatatgcaccaaaatctattaaatccttggtgggataaatattaataagtaagaggtggctcaatggcagtttttgttgaaaaaacgctccaaggtctaaaagaattaattgatgaaaaaggccgcttaaaaattttagggaatgaaggaactcttttagagacagaatgtactttctctaaaggtgcaacagatctggagattgagagttttgagaagaaaataaaagtctcacttcctgaagattataaaacctttttaaaattgcataacggagccagaatatttgatttgttgatttacggtgagaatgtgggtgggggattgcatattcttaatttagaagagattgaaaagtatatgcaaaatggttttttagagcctcagtttattcccgtcgcacatctgttagacggatgttatttgttaattcacaaaaccaaaatgtccacagatccaaactatttatggttccgcggatttattgagtatgaaccaattcaacttaattttgagatatttttagataggtatatcatgtctcaaggagcagatttttgggagtggaatatctatactgctgaaaattattataggactcaccagggtgatgaggattaacctttcctacagttgggttggttcatttttactattagacttcgatttgaacttttaaaaataggtttaatttaggagacgaaccgattaattggtgtatagaggatttataaaaagcgcagatactctgcgcttttttatttaagtattttccgaatcattcgcagcccgtttttggaagaaggataacggaaagcgaagtcgaagcggttcgtttgtttgacgacgctttttttgtgcgtaaacgtgttaaagctgtcaaatccgtgatagctcccgatgccgctttccccgacgccgccgaatggcaaatacggcgtcgcaacatgcattaacgtatcattgatgcagcctccgccaaacgacagattctctaaaacagtgcgctcagtttctttgtttgtggtgaagagatacagagcgagcggctttgggcgcgattggactttctcgatgacttcatcgatatcaccgtatgtaaacagcggaagaatcggcccgaaaatctcctcctgcatcactggagagtcatccttcacttgatctagaatcgtcggcgctattttgtggtgatcaggattaaattgtccgcctgtgagcgggacgccatcatttagaaagctgagcagccgctgatagtggcgttcactgacgattttgccgtactgcggattttgttcaggctgagggccgtaaaattcgctgatcgcacgcttcatttcttctgtgagcttcgttttgatatcttggtggacaaataaataatccggtgcgatgcaggtttgccctgcatttgtaaatttcccgaagacgatgcgtttggcggcaagctgtatatcagcatccttatggacaatgcagggacttttgccgccgagctccaaggtaacgggaattaattgtttggcggcggcctccatgacgatttttcccacggcaacgcttccagtgaagaaaatatagtcaaagggctgctgtaataacacagtgctgacgtcgggcccgccttccgccatagcgacatagtcactcggaaaaacgctgctgatgagtttggaaagaacagcggaaaccgccggggtatattctgacggtttaagaacgaccgtgttccccgctgcaatggctccaatcaacggagaaagcgccagctgcaagggataattccaaggcgcaatcaccaaaacggttccatatggctcagggataatgatgcttttcgagcctaggtgagtcagaggcgttttgactcgtttcggtttgatccattttcccagccgcttcatcacaaaactgatttcctccagtacaattccgatttctgtcgtgtacgactcctgttcggatttgtggagatcctgatagagagcggctgttatatcggcttcttgtgttttgatggcttgtttcagcttttgcagcatgttcagtctcgtttctagctgtctcgtatgccccgccgcaaaataggctttgtgcttgctgacgatagaggggatgctgttcatttcgtctctcctttttgtaaggtatggtgatttattatgtggaaagtttcttctgcttgtcaaatgggggtttctaatgtgcatgtagctgaaaagccagtaggcacataaaaaaagccccggacaggggcttttttaataaagagaggagcatctgtccattattctgacagcccaaaagaaaaaccccggaaacattgtcatcacaacatgtccggggtttaatccaatgctctttaaagagcgttttacttaacgggagtagaactcaacgataagcgcttcgttaatttccggagcaagctcagagcgctctggaagacgagtgaatgtaccttcaagcttttcagcgtcgaaagtaaggtactcaggaacgaagttgtttacttctacagattctttgatgatagaaaggtttcttgatttttcgcgaacaccgattgtttgaccaggttttacttggtaagacggaatgtcaacgcggcttccgtcaacaaggatgtgaccgtggttaactaattggcgagcttgacggcgagtgcgcgcaagaccgagcttgtacacaacgttatcaagacgtgcatctaaaagaatcatgaagttttcgccgtgtttaccagtcatttttgcagctttgtcaaacaatgtgcggaattgacgttcgtttacaccgtacatgtgacgaagtttttgcttttcttgcaattgcaaaccgtattctgatagttttttacgctgtcccggaccgtggggacctggtgcgtaagggcgtttttctaattctttacctgtaccgctaagagagattcctaaacggcgagacagtttccaagatggacctgtatagcgagccataatgtgactcctcctttggttttattttgtggaaaataaaaaccgtctgttcgatccgaccgtgcacattttgttttcatgtatcctcgctccagcagcagagagttacacgatacaccttacagctaaggaacaaaatgcaaacacagaagctgaacaaaaaggctgcaatatttcacacaaagaacattatatgatttttctccgccgccgtcaaccatttctccatgaagagtgccggtttatgatataatgtacaaaaatgagtagtacatgtttaggtgataaaaatgaaaaaacaaacaattgatgaagtgacggcctttcatcagaaaatgctttcttttttcttaacgaaatctgaatccgtctcattatccgactcgctgttatggctggcctcagctctagaatcctgctttacatctctttcattgaccctttcaccggcagaatcaacacgtttcaccataaaaacagaagatgaaccgcattatgctccgctgaaagagagtgacggccgttttattatcaggaatcagacctccggcagatccttttatctgtgctcggaaggcgggctgccgatcccggaatcattgcctgagatcgttactcagtttattaatcaatctgtgagacaaagcgggctgtttgacaaaacgaagcatcagcggaaaattcacagaatgacagaaatgttccattcgcttttggaccaaaatgaggttttggaaaaactgcaggcaagtttgagtacggctttccggtctttccgtttttcactgtttatcacgcaggatcaggatacggacagacagcttcccgcaaaagaattacatatggacggaaaagatgccgatccgtctgccctgaaggtttatttatcggggagactgctcagaaaaggcaggtcatctgcttatctgccgatcaaaggccagcaggggacttacggggttctgaagacggaggggctgcaggatgccgttctttcgtgcagtactctcagtgaaatgctgctgcttgcgggcgcagcgggaaaagcatttgaaaatgcgcagctctatgagcaatcgaaaaaaagcattgcgaatctggagctcattaatgaaacatcgcgccagctgaatcagcgcctcagactcactgatacgatgcgggagctcgccgccattatgacccaatcgtttcatgcggaagaagtggctttttttcatattgatcattttgagacgcaaaatctgcttccgggacataccgctttttttaagacagaacgtgcgaacccctatatcagcattgtgaaagaaaagctgttcgagggagaaaagggcgtgtttatcggcagcggaaagactgtattcggcgaaaacggtttcggctcgctgatggcggtgccgatgatcgaaaatgacaccgtcttcgggttcgcgattttattgaaaaaggatttgtatgcttttacgtttgaaatgtataaactttttcaagcgctcattcaccatgcgacattggcggttacgaactccatgctgcgcgacaggcttgagcatcttgttcagacagaccagctgacggagctgtattcaagaacctatttggatgagaaaattcaatacagcatgaaaattcataaacggggtgtattcatcctcgttgatatcgataatttcaaaaatattaatgatacatacggtcatcaaacgggagattcgatcctgattcaggtggcctccgttatgaagaaccatattcgtgagcatgatgtcgctgcgaggtgggggggcgaggagctggctgtctatctgccgaatatcaacgtgtcatccggagaacgcatcgctaaaaggctggttagcgccatccgggaaaataccgagccgcgcgtgacgatttcctgcggcgtttcctgctggtcaaagaccggcccgatgccgttgaaattgctcgttcagcaagcggatgaggcgctttatatcgccaaacggaacggcaaaaaccggctgatcatccatcaaaacagcacgacgacataaaaaaggagccggcctgccggccgggctcctttttttatcctaatcgtttttcaagcgtttcaacaaactttgctaaataggtttcgtccgtttcatcaaaacggtttttcacggggctgtcaatgtccagcacaccgatcacttcaccgtttacgcggatcgggagaacgatttctgactgggaagccgcgtcacaggcgatatgtcccgggaacgcattcacatcggcaatccgctgcacgtcgccattagagtaggcagtgccgcatacgcctctgccgaacggaatgcgcacacaggcaggaagtccttgaaacggtccgagcacgagctcgccctctttagcgaagtaaaaccccgcccagttgacttcatgtaatgaatggtataaaagcgctgacgcattcgcgtaatttgcgatcgcatccgtttcatcttctgtcatggcttcgagctgtttaagcagaagctgataacttttttctttatctccggattgtttttcgacatgaaacatggaaaaccctcactttttctataatatcaaacaaagttccggccgttctgccggcatttgtcgagaagttcttacaggaacggcgcctttctgcttgaattgttacacataaaggggtgagccgtatgaaagtaagcaccaaagacaaaattattaacgccgctgtccagctgtttaaccaaaaaggttattccggcacgtccgtccgtgaaatcgcaaagtcagctgatgtaaatgttgcgcacatctcctactattttaaagggaaaggcggattaatggaacatttagtttccgagttttacgaaggctatactgaagcgctggaaaaagccgccgtcagtatgaacggtgaagacgcgcaggaacgcatcctgcgggtgattttcgatattttatcctatcagcacgataaccgtcaattaacgcggtttgtataccgggaagtgacgattgattccgtgcttatcagggaaattatgtctacttacttaatgaaagaaaaatatattttccagctggtgattgaagaagggcagtcacgccacaggcggctgacgctgcccgtgccgcattttattctgcaattgaaatccctcttgatgatgccgtatctccagcctcaatatattacggaggtgctctatatgcagcctcatgagccgtacttttataaaaggtattttgaagaggtgaagatctggatcgaaagcgtgttccgacggcctgatgcagcgcttatgaagtaatgatgtttttgtacgtttcgtaggaactgccgacatcttccgcttgatgggcgtccgacccgaatatgagcgggatttttttttgcttcgccgtctcagccatccaatcctccatgtatacttccccggcaaatttctttctgagcccggatgtattcacatccagctccattccgtgttctttcacggcgtcaagacagcgggccgcaagctctcttatttgaggtgacatgctgtaagggaaaaggcgcgcgaattttttgacgagcgtgatatggccgacccgttttggcttaaaggggccgagcggtgttacaatggaagaatacacggtttcatagtattgttcatatacggcttcaacgcttccgaagcggtcggcaagctgctgaaaggcgtgctcgtcaaaatcgaggcatatataagacggaccggtcttcaaaaaatgaacggataaaatgccgtcatccagtgaggggccgtacgtgttcagaaacgccgcggtttcctcttcataccctatgataaaatcggtttctagcccagtcagaatgctgatttgtccatcgtattcctttttcagctgtgacagccgctccaaataaacctccatctgtctgagatccatcgcgctgtcctgaagcggtacgggatcttgaaatgacggaggaaggggggcgtgctctgtaaatgtgatcgagtcaaagcctctttccagggccttttcgacatattgtttcagcgcatccttcgagccgtgagggcaaaaaggggtgtggatatgagcgtctcgtttttccatttgtgtcactccattaaaaaattgcagaatcctgccgaaattatgcaaaaagtttttgatttctggtcaaaaaatgttggttacatggtatcataataacaatgaaaacgacagattttctcaatacatatattgaaatctttctgaatacataaaacaccctgacagattaagagaacaacaagggggctcattatggagttagtcatcggattattggttatactgctcgcgctctttgcggcgggctactttttcaggaaaaaaatttatacggaaattgaccggctggaatcatggaagattgaaattttaaaccgttcgatagtggaagaaatgtccaagatcaaacatctgaaaatgaccggagagacggaagagttctttgaaagatggcgcgaggagtgggatgaaattgtcacagcccatctgccgaaagtagaagagctcctttatgatgccgaagagaacgccgacaaataccggtttaaaaaagcgaatcaggtgcttgtccacatcgacgacctcctcactgcagccgaatcaaatatagaaggcatactgcgtgagatcagcgaccttgtgacgagcgaggaaaaaagccgcggagagattgaacaggtgcgtgagcggtattcaaaagcgcggaaaaaccttctggcgtacagccatctctacggagagctttataacagcctggagacggatctcgacgaaatctggagcgggataaaagagttcgaagaagagacggaaagcggcaattacatcaaagcgagaaaagtgctgcttgaacaggaccgcagactggatcagcttcagacatacatagatgacgttccgaaactgcttgcggactgtaaacagaccgtgccgaaccaaattgccaagctgaaagacggctaccgggaaatgacagaaaaaggctacaaactggagcatattcaaatcgaaaaagagctggatacactcacaaatcaagtgaaacgggccgaaaacgcgcttttagaagaattggatgtcgacgaagcgtccgccatccttcagctgattgatgaaaccattcaatcgatgtatgaacagctggaaggcgaagtggaagccggacagtccgtattaagcaaaatgcctgagctgatcatcgcgtatgagaagcttgaggaagaaaaagaccgcacaaaaaccgaaacggagctcgtcaaggaaagctatcagctgacggcgggagaaatcagcaggcagcatgccttcgaaaaacagctggaaacgatcggccggctccttgagcaggcgagagaaaagcttgacggcgagcatgtcgcttactcgctgctgattgaagaagtcgaggccatcgaaaagcagatggaagaggctcagaaagaacatgccgaataccgtgaaaatctgcaggcgctcagaaaagaagaactgctggcgcgggaaacgctgatgcatcttcggaaaaccatttctgacacggcccgaatgctgcaaaaaagcaacgtgccgggaattcctgaacaagtcaaggacaagctcgagacggcaaatcatcatatagaagaaaccgtcagccaattggaagagctgccgctgaacatggaggaagccgccaaacatctggctgaagccgaaaaggtggttgaggaagtcagcgaagaggcggaagatcttgtgattcaggtgaagctgattgagcgaatcatccaatacggcaaccgcttccgaagccagaatcatattttatccgaacagctgaaagaagcggaacggctgttttatgcttacagctataatgaagcttatgagatggcggcagatgctgttgaaaaagcagctcccggcgccgtgaaaaaaattaaagctgatcaatctgcttcatagacgcataagcaaaaactgcaccctgatggaaatcagaggtgcagttttttagtttctcacggaatataaaaagcgcctgcggctgatatacatcaaaccgcaggcgctgaatgttacgattttgctttatttaattcgatgggcgggctggtaaaaaacgtgataatgcagccgatgatcgctccggcaatgcccggaagcacccagccgattcccatgctgtaaagcggaagatttgcgtttaagaatgaatctaatgatccgagcggaatgcctgctgccttcaaaccgtccaagatactgaacagccctgttccgatcaggcaggcgatatagacttcgcgtctttccttaaagattttatcaataaaggaaaggacgataatgacaatcgccagcgggtaaatggctgataaaataggaactgaaaatgcaataatctcagcaagtccgaaatttgaaatcgccagactgaacagcgtgacaatcgtaaccaccattttgtatgataaagcgggaatcaattttgaaaaatattcgccgcaagatgtgacaagcccgatgcttgtcgttaaacacgcaacggtgatggcggcgccgagaacgatgtttcccagtgaaccgaacaggtaatcagatgaagctgataaaatctttgcgccttcgccgagcggccccacagcgtccgtgcttgtcgctcccaaataggccaaagataaataaatgaatgtcaaacctgccgctgcaatcagacccgctttaatacaagcggcggcgagcgctttacgctgggtgacgcccctgcttttaacagcgttgacgacaacgacgccgaagacaatcgaggcgagcgcgtccattgttttatagccttccaaaaatcctttgaacaccggcgttccggaatatgcctgatgtacggcgcccagtccgcccatcggagtgacaatggcttttacaacgatgattaaaataataccgaatttaataggagtcaaaatctttccgactctgtccacgattttggaaggattaagagctaaataatacgtaatagaaaaaaagatcaacgtgaaaacaaataaagataatctttccggaatgccgcttaaaaacggaactgcaccgatttcatatgaaacggttccggttctcggaatcgcgaaaagcggcccgattgataaataaagcacaacggtgaaaatagtcccgaataccggatgagctttatcggcaagcccttttgcgtctttgcccgttaatgcgatggcgataatacccaaaagcggcagacctacgccggtcagtaagaaaccgcccatcgctttccagacattatgccccgccgcttgcccgagctccggcggatatatcatatttcctgccccgaaaaaaagtgcgaaaagcatgaaaccgataataacggtatctttgacaggtagtgagtgtttcataaaaatcctcctaaatactatgttgaaatattctgtcaattaattgtcagataatataacaaaacgaacattacttattatatggcaatgtacagagaagtcaatactcgatttattgcgaatttatatttacttttgttatggtagcataaatatcatacgatgtaccgttttcattaaaggagtaaaaaaaatgatatatttagacaacagctcaacgaccgagccgtatgaagaggttttggaagtgtataaacagacgagcagccggtatttcggcaatccttcgtctctgcaccggttaggaactgagacggaacagctccttgaagcggccgctcagcaaataaaaaaaaccttgcgtttaaaaaattatgatattgtatttacatcaggcgcgactgaagcgaataacgctgcgttaaagggagcggcctgggcaaacatgagtaaaggaaggcatatcattgcttcggcgattgagcatccttctgtgacggagacacttgatcagctgacagagctgttcggctttgaagtcacatatcttccggccgatcaaaacggcttcgtttctttgaaagacgtcaaatcggctatcaggccggatacgataatcgtcagcgtcatgcatgtcaataacgaagtcggctccattcagcccgtaaaggaaatcggcgggtttttgaagcagcaccggaatattctgtttcatgttgatcatgtgcagggcattcataaagttccgctgtctatagaagaagcgggcattgacctttgtaccgtttcagggcataagtttcacggcttaaaagggacaggagcgcttatcgtgaaaaaaggaacgcggctcattccgcttatcacgggcggctcgcagcaaaaaggtgtccgcgccggaacggaacacacggcaggcgccgtttcccttgcgaaagcgatcaatctttccgcgcgtgacatgaacgagcggctttcttccgtggaggctgccaagaatgcgctcatggaaaggctgagcgggacggacggggtcgttatcaacacccccgctgaaaacagcgcgccgcatatcattaatttttccgttccgggcgtgaaggcggaagtgctgctgcacatgcttgaggaaaaagaaatatatgtctccacaaccgcggcatgttcggcaagagagcacaaaccgagccgtgttcttctgcaaatgaataaaggcgaacagattgcatcaagcagcatcagagtcagcctgaacttcagccatacggctgacatcacagagccgtttatggccgcgctggcgccggctgttcaaaaactaaaaaaaatgatgaggtagcatatgaattacgatcatattttaatccgttttggtgaaatatccacaaaaggaaaaaacagacgcagttttattgaaagattaaaacagaatatccgcctggtattaaaggattataaaaaagtaaaatacttttcaaaccgggaccggatgtcaattacacttaatggagaaaacccggaggaaatttgttccttattaaagaatatattcggcattcaaagctttagtctcgcaattaaatgcgaaagcaagctggaagacataaaaaaaacggctttagccgcgatagaaggcgaatataaaccggggaatacgtttaaggtcgagaccaaacgggcttacaaacagtttgaattagatacgaatgcgatgaacgctgaaatcggcggccatattttgaaaaacacggatggattaaccgtcgatgtgaaacatcccgatattccgcttcggattgaaatcagggaggaagcgacgttcctgaccattcgtaacgaaaaaggcgccggaggccttcctgtcggttccgcgggtaaagcgatgctgatgctttccggcggttttgacagtccggtcgccggtttttacgcgatgaaacggggattatcagttgaagccgtacatttcttcagtccgccgtatacgagcgaacgggcaaagcagaaagtcatggatctcgcgggatgcctcgcgaagttcggcggcagtatgacaattcatatcgtgccgtttacaaagacgcaggaactcatccaaaaacaaatcccggagaactatacgatgacggcgacgcggcgtcttatgctgcaaatcgcggacagaatcagagaagaacggaaagcgctcgcgatcattacgggagaaagcctcgggcaggtagcgagccagacgcttgaaagcatgtatgcgatcaatgcggtgacggcaacgccgattttacgccctttaatcggaatggacaaaacagaaatcatcgagaaatcaaaagaaatcggcacttatgaaacaagcattcagccgtttgaggactgctgcaccatctttacgccgccaagtccgaaaacacgcccgaaaaaagaaaaaatcgagcacttcgaaagcttcgttgattttgaaccgctgattgcagaggccgctgccggcatcgaaaccatcactgtttactcggagcaggaagctcacgataagtttgccggcctgttttaaaactgtatacaattaccaaagtttttttgaatgaagacatgtgttttatcacattctatactcacaaggaggtgatacacatgtcacaacaatcaaacagcggaaacagcaaccagcttttagtgccaggcgctgctcaagctatcgaccaaatgaagtatgaaatcgcttctgaattcggtgtaaaccttggaccggaaacaacttctcgcgccaacggttctgtcggtggagaaatcacaaaacgtcttgtctcttttgctcagcaaagcatgggcggaagcagccagcagcagttttaatcacaacttcacataatggctaagagagcggggaattccccgctcttttttcatgagtatagatagaaggcgggaagcaatttatgcatatttttattgtaatggcctatgtttatgtataatggggaaagaaagtgaggagttgttcgtgttaaaacgagaagatttaatcgccccaaagaactataaccttgtaaatgaaatcgaaaagttcagccgttccaaagagaagaacgcgcttatttgggaagatcaaacaggcggtaagaaagtctggacgtatgaaaaattgatggaagaaacgaataaaatcggagcccgcctgaaaggtctcggatttgaaaaaggcgataagctgattgtcatggttccgagagtgcttgaagcgtatgccgtttatttagcgatcttaaaagcggggatggtcgtcattccttgctcggaaatgctgcgcgccaaagaccttgaataccggatcaaacacgccgaagtgaaaggcgctatcgtttatccttcatttataaacgcgtttgacgaggtgaataccgagcagctggtgacattgtcaatcggtgaaaataatgtcggctggaaaaacctcctaacgattgaagcggacggagacagttttcaaacagctgatacaacaagagaagacatggcgtttttgtcctatacttcaggcacgaccggccagcctaaaggcgttgtacatacacacggctgggcctttgcccatttaaaaacatcagccggtgcatggctggatatttctgaagacgatacagtgtgggccaccgcggcgcccggctggcagaaatgggtgtggagcccgctgctcgcaattctgggaagcggcgcgacaggagtcatttatcacggcagattcaacgccaagacgtatttagagctgctggagcgccatcaagtaaatgtcttctgctgtaccccgacggaataccgcctgatggcaaaagtggaggagttggacaaatatgatctttctgcccttcacagcgcagtttctgcgggtgagccattaaaccgggaagtcattgacgtattccggaagcatttcggcattaaagtgagggacggatacggccaaacggagagcaccctgttagtcggcgtcctgaaggacatggatattaagccgggaagcatgggcaaaccgacccctggaaatcaagtggagattataaacgataaaggcgaaatatgcgaaactggcgaaacgggcgatatcgccgtgcatttgagcacaccggccttattcaaggaatattataaagatcccgaaagaacgaaaaagcagattcgcggagattattttcttacaggagaccgagcgaaaaaagacgaagacggctacttttggtttgagagccgcaatgatgacattatcgtcagctccggatatacaatcgggccttttgaagtagaggacgcgctcgtgaagcatccggaagtgaaagaatgtgccgtcgtggcgagcccggatgaaatcagaggttcaatcgtaaaagcttatgtcgttttacaagacgatgaaaagcgcagtgacgaacttgtcaaagaactgcaaaaccacgtaaaaacgattacggcgccttacaaatatccgagagaaattgagtttgtcgaaagcctgccgaaaacggcgtccgcaaaaatcagacgtgtggagctgagacagcgtgaagaacggctgaaggctgataaaaaagcataatacaggataaagggtgagcggggatgaaagcgatttggcacggcggcaccatctatacaatgctggacaagaatcatgtcactgaagccgtttataccgaagaaggcgtcgtcaggcagacgggcagcttccgggagctccaaggaacatacggtgcgcctgatacggaggaaatcgatttacatggagctgtgatgttcccggggtttacggacagtcatatgcatttaatcggacacggggaaaaacagcttcgcctcgatttgtcgcagctgacgtcaaaagaagcgatactgcgggccgcaaaagaagcagagtgtgaattggaagatggcgaatggctgatcggcgaaggctgggatgaaaatctgtttgagcggccggtttacgtcacgaagcatgaccttgacccgctctttcccgaccgccccgtcctgctgaagcgggtatgccggcacgccgccgcggttaattcagccgcattgcgcgcggcgggaattacaaccgaaacacctgatccaaacggcgggattatcgtccgggacggcaccggtccgacaggcctcctgctggataaagcccaagagcttgtgacacaggccctgccgcccgtctcacttcactatgtcaaacgcgcgcttcaaacggcgattacggactgctggtcaaaaggcctgaccggcgggcattcagaagatctggcatactacggagacgcgtccgttcccgttgccgcgtacgagtcattaaccggcagcggcctttatccttttcgcgcccatctgctcgtacatcacgaagccgtcgacagctggagcgctctggataaatcgaccggaccttatctggaatacggagcgatgaaaatttttgctgacggcgcgctcggaggcagaaccgctctattgaaaaaggcttaccatgatgatccgtctgtttccggcgttcaggtgcatgatgacgaaacccttgccgctcttgtttataaagcgagagagaaagggatggagatcgccgtgcacgcgattggcgaccttgcatttgaaaaggtgctggatgttatcgaaagatacccggcaaagcccggacagcttgaccggctcattcatgcgcaagtattagatgacggattgattgaaagagccgcccggctgccgatcggacttgatcttcagccgcattttgtggccagtgattttccgtgggtgattgacaggctcggagaagagcggatgaaaacggctttcgcctggaaaacactgctgtcaaaagggctgctgtgcgccggaggttcagatgccccgattgagccggccgatccgcttctgggcattcaatcggctgtgctccgtacgagcaagcagcacccggaaggtccggcctattatgaaaaagagtgtctgaccgtgtacgaagccattcagctttacacggagggaagcgcggccatcatccataaagaacatagccgcggacggatcgcccccggctatgatgccgactttaccgtactcagcggtgatccgttcaggacggacccgaaaaagcttcatgaattggaagcggtcaaaaccgtcgtcggcggccgtatcgtatatgaaaaagaggacaggcagtgatgcccgtcctctttttttatgataaaaatgatcgttttactttttcccagaaagagttgtctttcagtttcaccgttttgatttttttatcggatagtctaatctcaacctttttgacattccgcgtgctgagcgcttcattatcaagcccgataatcggatgctcattgccgtcttgcaccacctgcagtgtcagcttccggtctgagcttaaaataaacgaagatccgagtgtacggtatgtgttgttgttcaacgatgccagttcggatacctgcatgcaggaaatcaaaggatcaacaacggcgcctgaaacagatttattgtaggcggtgctgcccgtcggggtggaaatgatcatcccgtctcctctgaacgtctcaaaatgaagatcatcaattaacacatccatcacaaacgttttaataatgcttgaacggatggaaacctcgtttaaacagtgaaaatgattgctgccgtccaccgttacgtgaatgagcgggtattttctgacctcaagctgttccgcggtcatgctggccgccattttttcaggctcatcgctgtgaaaatcacagtacaaatgggctttcccttttttagcgatgccgacatacaggcagtcatcacggaatccggtttttctgacggcttgcagaaatgagccgtcgctgccgatgctggcgataattccggcatcctccggttgagccgcaactgtaaaaccgtgcgattcagcaagctgcttcaaagagctgacttgttcttttgtttcgttgttttgtttgtgaaaaaaataaacattgcggcgaagatcggtcatatccccattcccctttgctgtcatatttacgtttttctcccagcaggtattgtgttaaaatacctgtggcaatagtgtaacatgtttcctgtttatccgttaagggaaagcgcttcatgaaaaaaatgaatctttttttacgggggaacgtacgaatattgacagaaaaggaggagaacaaatgaatgcaaaaagatggattgcgctcgtcatcgcgctcggcattttcggcgtatcagtcattgcaagtgtgaccgtcggggtgctgaagaatatcggagatacagggtctgactttgcatcactgacagatgacacagaggaagtgacgctggataagggcagccccggcagtaaaatcgccgtgcttgaagtggacggcacgattgaggataacggcgggtccgctggcctgctcagctcaggcggatatgatcacagatcatttttaaaacaggttgagcgtgcgaaagaagacaaaagcgtcaaaggaattgtgctgaaaatcaattcccctggcggaggcgtgtacgaaagcgcggaaatacataaaaaactggaagaactaaagaaagaaacgaagaaaccgatttatgtatccatgggttccatggcggcatcgggaggctactatatttcaacggccgccgataaaatctatgcttcaccggaaacgctcacgggttcactgggcgtcatcatggaaagcgtcaattattccaagctcgccgatgaactcggcatcaagtttgaaaccattaaaagcggcgcgcataaagacatcatgtccccgacccgcgacatgacgaaggaagaaagaaagatcatgcagacaatggtcaacgattcttatgaaggatttgtcaatgtcatttcaaaaggccggcacatgtcaaaagcggatgtgaaaaaaattgccgacggccgtgtttacgacggcagacaagcgaaaaaaatcggcctcgttgatgagctcggtttttacgatgacacgatcagcgcgatgaaaaaggaccataaaaatatgaaaaacgcttcagtcatcacatacgaggaaggattcggattaggctcgctcttttccatgagcgcagcgaaaatgtttaaaagcgaaattgattttctgaatatgaaagaactcatttcgcaatccggttcgccgcggatgatgtatctctatgcaaagtaggggggaagaaagaatggacgcgacttacgaaggctttcacggcaaagaagaggaagccgaacaacagagggcgcccgagcaggcatatgcgggcttttggatcaggttttgggcgtttcttcttgattggctggtggtctggggacttaaccatctcatcgtttcaccggttttcacgctgatgaagctcccggcaacaagcggaatgtttacaatctcagcttattccgtcacaaccctgatcgtctacctcgcctattttgtgttcatgacgaaatggtttcatcagacactcggcaagatggtcttcgggttaaaggtcacttctttgacgcccggaaagccgctgacttggagcaccgtcattttcagagaagcggtggggcgttatatcgataaaatctggattctctatatcgtcattgcgtttacgcccaaaaagcagggcattcatgatctgatcgccgacacaacggtgattcacgaagcgctgtaccgcaaataaaagcagtaaacccggaataaacgtccgggtttattttttttggttttggcgataatgctgctaaggaagtgaagcttatgggatatgccgcagcagctgttattctcattctcattttggcctggctgctcatgaggatgaaaatccacctgactttcgaatatcttcacgataaagataacgacaaactgacgtttaaaatctcggccttatacgggctgatccgtattaaaaaaacgctgcccgtcattaaagtaaacagcgaagacgcgtcaattgatgtcaaacaggacacaaaatcagaaatgaaaggtcagaaaaaagagaagaaaaaaatcacatatgaagatgtcaaacagagcattcacagaatagaaatgattctgcaccaagtctttcagatgcgccaaatcgccgcttcatttcttgcgggagtccgtgttacgaagttcgaatgggtgacggttatcggaataaaggacgccgccgttacgggaatcgccgccggcggattgtgggccgtaaagggaggacttacggcgatgctgtatgatcatctgcgtttcatacatgaaccggtgtgcgaagtcattccgtcttttcaagtgcctgcatccaagacgcatttgcagtgtatattcttttttcgttttggacatcttataggtgcagctttcaaattgctcaaatacgggcggaacggactttctatcatacgaaagaaacagccggttccggttgcttcaaagaatgattcatcagtttaaggaggagcgcatatggcagaccatcccattcaaggtttaatgaaaaccgctatggaaaatttaaaagaaatgattgacgtgaatacaatcatcggcgatcctgttgaaacgcctgacggcagcgtaatcttaacggtttcaaaggtcggcttcggatttgcggcgggcggaagcgagtttggaggaaagccggctgaaaaaagaaccgatgatgatgaaagaaaagagcagaagctcccgttcggcggcggaagcggcggcggagtatccattacgccgattgcgtttctgattgtcggaacaaacggcgtgcgtatgcttcatttagacgaaaacacccatctgattgataaactgttagactccgcgcctcaaacgattgaacgcatccagcatatgtttaaaaagaatgaaaaaggccggaaccaaaaaagaacggatatcgatttataacagaaaagttaactgccgcccgcagttagctttttttacgatgcggcataacctttgcagtttgcataaaactcgactatgatagagctatacatagataaagggaggaatcagaatggctgaaattacatttaaaggcggagccgtgacgctgatcggacaagaagtgaaaccgggggaccaagctcctgacttcacggttttgacaaacggattagaagagaagacattagcagatatgaaagggaaagtaacgatcatatccgttattccttccattgacacaggcgtatgtgacgcgcagacacgccgcttcaacgaagaagccgcaaaactcggtgatgtgaacgtttatacaatcagcgccgaccttccgtttgcacaagcgcgctggtgcggagcgaacggaattgataaagttgaaacattatcggatcataaagagatgtcatttggtgaagcattcggtgttcacatcaaagaacttcgtcttttagcgcgttccgtatttgtccttgatcaggacggaaaagtcgtttacgcggaatacgtaagtgaagcgacaaaccacccgaattatgaaaagcctatcgaagctgcaaaagcgttaatcaagtaaagagagaaaaagagctccgggtgctgccgcggagctcttttcatggcaaggaggaaacagcatgcaacacgaccatgtcggtcagatttatgaacttttagatgaagccgcccaagtgatagcagaaggccttcagatttcttatattgaggggcttgcggaagcgggagaaatgtattttcttgaaaaggccgaccagcttccgcttcaggaaaagcaaaccggcgagcttaaaagcctgctcgcgaaagcagacttcagaaaatgggagcatgaatggatccgcaaggcgttccagctcgccattttaaaagggctgaaagataagtcccatccgaacagacagatgacgcctgatacgatcggcattttcatcagttacctcgtgaataaatttacgggcggccgaaaaggcctgacattgctggaccccgcctgcggcaccggaaatcttctgctgaccgcggcaaaccagctttctgacaaagcggcaaaaagcttcggcattgaaatcgacgatgtccttctgaagatcgcttatgctcaggcgaatctgcaggaaaaagaaatggagctgttctgccaggacagtcttcagccgttatttatcgagccggccgatgcggtcatctgcgatttgccggtcggctactatccgaatgacgaaggcgctgaagcgtttgagctgaaagcggatgaaggccactcttttgctcaccacttatttattgagcagagcgtcaaacatacaaaaccgggcggatacttattttttatgattccgaaccatctgtttgacagcgcgcaaagcgataaactgaagcggttttttgcggaaaaagtgtatatcaacgcccttcttcagctgccggctactatgtttaaagacgaagcgcaggcaaagagcattttaatcttgcagaaaaaaggcgaagacgcaaagccgccgaaacaagcgcttttggcgaatcttccttcttttgcgaaccagcaggcgatgcgggagatgatggcaaaattggatcaatggattcaaaaagaaaaataatggcgaaaaagcagtgtgagatgcaaaatcccgcgctgcttttgctttttaaaatgaatgggaatcaggacgataacacaaattaaggaaagaaaataacattccgtaagaccgtgccgtccatttggcacaaatgaaatttatcagaaaatatcgacttcatattgtaagcggtaccaatgtggatgttgacttgaaatgctgagttgacaatgtttaaatggaaaagtcagatattttttagactgcaattatggtctgggaaaaaagaacgaacaaacgaagaagaattttgataggagcgtcatttatgtctaaaattattgcaattaacgcaggaagctcatctttaaaatttcagttattcgaaatgccttcagaaaaggtgctaacaaaaggtttagtagaacggatcggtatcgccgacagcgttttcacaatctctgttaacggcgaaaaaaatacagaagtgacagatattccggatcatgcggttgcggtgaagatgctgcttcacaagctgactgaattcggtattataaaggatctaaatgaaattgacggaatcggccaccgtgtggttcacggaggagaaaaattcagcgattctgttttgcttacggatgaaacaatccgtgagattgaagagatttcagaactagcgccgcttcacaacccggctaacatcgtcggcattaaagcctttaaagaagtgcttccgaatgtgcctgcggttgcagtgtttgatacggcgttccaccaaacgatgcctgaacaatcctacctgtacagcctaccgtacgaatactacgagaaatacggcattcgcaaatacggtttccacggtacatctcataaatacgtgacacagcgcgcagctgagcttctcggccgcccgcttgaagatttgcgtctgatttcctgccaccttggtaacggcgcaagtatcgcggccgtagaaggcggaaaatccattgatacgtcaatgggcttcacaccgcttgcgggtgttgcgatgggaacacgttcaggaaacatcgaccctgcattgattccgtacattatggaaaaaacggatcagacggcagatgaagtattaaatacgttaaataaaaagagcggactgcttggcgtatccggtttctccagcgaccttcgcgatatcgtagaagcttcaaaagaaggaaacgaaagagcggaaacggctcttgaagtgtttgcaagcagaatccataaatacatcggttcttacgctgcgagaatgagcggcgttgacgcgattattttcactgcgggtatcggtgaaaacagcgttgaagtcagagaacgcgtgcttcgcggcttagaattcatgggtgtatattgggatcctgcgctgaacaacgtgcgcggcgaggaagcgtttatcagctaccctcactctcctgtcaaagtcatgatcattccgactgacgaagaggtcatgatcgcacgcgacgttgtccgccttgcacagtaatgatcaaaaaaagcacatccttttagggtgtgcttttttattgaatgccccagaatcaaacgttacgatatgtttattacataaacgatgaggtgaagcaatgagtgtgcatgaacataaacaagaagccccgtcagccgtgcgctgcaaggtgattacagtcagcgacacgagaacgaaagaaaccgacaagagcgggcgcgtcatgatggacttcctcagggaagcgggatttgaaacggtcgcttatgacattgttaaagatgaaaaagatgaattgcagaaagccgttttatccggctgtatggatgaatatacagatgcggtgctgttaaacggagggacgggcattgccgaaagggatgtcacaattgaagcggtcacgccgctgttttcaaaagaactcccgggattcggcgagctgttccgcatgctgagctatacggaggacatcggttccgccgccattttgtccagagcggcagcgggtgtgatccaaaataccgcagtcttctgcacgcccggctcctcaggcgccgtaaagcttgcaatgagtaaactgattattcctgaactgccccatgtgctccgggaaatccgaaaagatttataaatgtataaaaaggctctgctccgctcaaaaaattgggtggggttttttttataaaaggcttgaaaaaacagaatttacttgttacagtgtatacatacaaaatgcatttttattaattaaaactaatttttatacaaaagggagcttttaacatggcagaacaaaaaaaggttgtattggcatactcaggaggtcttgatacttctgtagcgataaaatggctgcaagaacagggatacgatgttgttgcctgctgtttagacgtaggggaaggaaaggatttggcattcgttcagcaaaaagcgctggaagtaggcgccgtaaattcctatgtgattgatgcgaaggaagaattcgcccgggagtacgcgctcatttctatgcaggcccatacaatgtatgaaggcaagtatccgctcgtatctgcactatcccgtccgttaatcgcgaaaaaactcgttgaagtcgcggaaaaggaaaacgcggtggctgtagcgcacggctgcacgggaaaaggcaacgatcaggtgcgtttcgaagtatccattaaatcattaaatcctgatctggaggtcattgctccggtccgtgagtggcaatggtcgcgtgaagaagaaattgaatatgccgcaagccgcggcataccgattccgatcaatcttgacagcccgtattccatcgaccagaacctatggggacgcgccaatgaatgcggtatattagaagacccgtgggcggcgccgcctgaaggggcatatgacctgacagcatctcttgaaaacacgccggacgttccggaaatcatcgaaatcgcatttgaagccggtgttccggtttcaatcgacggcgtaacctacccgctcgctgatttaattctcaagctgaacgagactgccggaaaacacggcatcggccggattgaccatgtggaaaaccgcctggtcggcattaagtcccgtgaagtttatgagtgcccgggcgccatgactttgattacggctcacaaagagcttgaggatctgactttagtgaaagaagtggcccatttcaaaccggcaattgaacaaaaactgtctgaaatcatctataacggtttatggttctcgccgttaaaagacgcgctgcttgcattcttgaaagaaacccaaaaacacgtcaccggcgtcgtgcgcgtcaagctgtttaaaggccacgccattgtagaaggacgtaagtcggaatattcactctacgacgaaaaacttgcgacatatacaaaagacgatgcttttgaccatcacgcggcaatcggtttcattgagctttgggggctgccgacgaaagtaaacagcattgtgaaaaagaaggagcagattgaagcatgaagaagctttggggaggccgttttcaaaaaacaccggaaaagtgggtcgatgagttcggcgcatccatcacattcgaccaaaacttagtcaaagaggatattacagggtctctcgctcatgcggcaatgctgaaaaaatgcggcattctgacggaagaagaagaaggcgccatccgacaggggctgcagaccctcctgcaaaaagcagaggaaggaacgcttgaattctctgttgattatgaagatatccatttgaatattgaaaaaatgctgatcgaagaaatcggaccgctaggcggcaagctccataccggcagaagccggaatgaccaggtggcgaccgacatgcatttgtatttgaaagatcatgtctcacatatcatcgtgctgattgaacatttccaaaaagcgctgatcgaaaaagcggagtccaatgtcgagaccattctgccggggtacacccatttgcagcgggctcagccgatttctttcgcccaccatctgcttgcttatttttggatgcttgaacgggataaagagcgttttcgcgatgctatgaagcggattaacatatcgccgctcggatgcggggcgcttgccggaaccacgtttccgatagaccgtaactattcggcggagctgctcggttttgactccatttatgagaacagtcttgacggagtcagtgacagagattttattctcgagtttttaagcggcagcagcatgctgatgatgcacctttcgcgtttatcagaagaaatcattctatggtgctcgcaggaattcagattcattgaactggatgatacgtatgcgacgggaagcagcatgatgccgcagaagaaaaaccccgacatggcggagctgatccgcggtaaaaccggacgcgtatacggtgatatgatggggcttttcacgattatgaaagggctcccgctcgcttacaacaaagacctgcaggaagataaagaaggcatgtttgacacggtgaaaaccgttgaaggaagccttcagattttcacgggcatgattgaaacgatgaaagtaaacaaagacatcatgaaacaagcgacaaaacaagatttttcaaacgcgacggaacttgccgattatttagctaaaaaaggcatgccgttcagagaagcgcatgaagtggtcggcaagcttgtgtacagctgcattgaaaaaggaatctatttaagtgatatggcatttgaagaattccttcaagccagcagtctctttgaagaagacatctataccgtgctcgatccgcatcatgcggttgaaaaaagaatgagcgccggcggaacgggttttcagcaggtagaacaggcgctcgtaaaagcaaaagcctgcgccggcatttaatttgctgaaatttccttcatattttcccgtcatatcagacaccctacatctataaagatgggaggtagaaggaatgcgcaaagaacaagaccgttacatctatgatgaaaaagaaagtgaagaaacggccaggctcatctcagaggcatacgaaagcggttatgtcggcatggaggaagcctctgctccttcagaaaattaagctgtctgtaaagacggcttttttttcgtgcggacgaagtgcaaaaaagtgatattgccgtttgtttatagtaaagtagagggagaaacgtcttgattttattgaagcggcaacgttgcctggggagggtattcaatgtgcgacatgctctaatcactgccggtacaaagggattgggccgaaaagtgactgaaatgcttctggaaaaaggcttttctgtcacagtgaattacagacaagacgaagaagcggtcgcctgtctgaaggcggattatcccgggtgccatgacagattgcaattcgttaagggcgatgtaacccggaaagaagatctcaagcggatcgccgatgcagcccttcagcggtttggaaggattgacatactgattaacaatgccggaccgtacatatttgagcgcaaaaagcttgccgattactccgatgacgaatggtatgacatgcttgaagggaatttaagcgccgttttccatctgtttaaagcggttatcccggtcatgagacagcagcggttcggccggattattacatacggttttcaaggagcggaccatgcccccggctggcttcaccgttccgctttcggagcggctaaagtcgggttggcttcgttaacgaaaaccattgcgattgaagaagctgaatcaggcattacggccaatatggtctgcccgggtgatattgtaggagatatgaaagaagcgtctatagaggaagcaagacggaaaatcggcaaagaaaagacgccgatcggcaggtccggaaccggagaggacattgcgagaatcatcgcctttttatgtgaagatgattccgatcttgtaaccggaacgatcattgaagcaacaggcgggctgaatgtgattaacaggcatcaatccctgtaagttttttcgtttgtcaaaaagggaacttgataaatattaattttttatgaggtgaaaacgatgaaagtgacttatcacggacattctgtcattcaagtggaaacgaaaacccataacattatttttgatccgtttctgaccggaaacagtctgacaaatttgaaaccggaagaagtgaaagcggatgtcatcctgcttactcacggacacaatgaccatgtcggagatacagagcagatcgctaaacaaaacgatgcgctcgttattgcgccgaatgagctggccgtttatctcggctttaaaggtttaaaggtccacccgatgcatatcggaggggcgcgccaatttgatttcggtaaagtgaaactgacacaggcattccacggatcggcggtcactgatgaagaaaacaaaaccattacgtacacggggatgccggccgggattttattgacgattgacggcaaaacgattttccacgccggggacacggcgctgttctctgatatgaaactgatcggggaactgaatcacattgacctggcgtttctgccgatcggtgataacttcaccatgggccctgaagatgcgaaactcgcggctgaatggctgagagcgaaacaggtcgttcccgttcattacaatacatttcctgtcattgaacaggaccctgacgctttcgccgaaagtctgcccggaggcgtcggcaaagtcatggcggtcggcgagaccattgagcttgcctgacatatgtgtcaaagaccttctgaatcaagcattcagaaggtctttttgtgatgccgccttttttcgggcgtctcattgcgaatgaatccctcgtacccttataataaaagcagaagactgtccttagaggtgaaacgcttggcaacaaagcatgaacaaatcatatcatacatagattcgcttcctgtcggtgaaaaaatttcggtcagaagaattgcgaaagaaatgaaagtcagtgaaggaacggcttacagagccattaaggaagccgaaaacaaaggattcgtttccactattgaacgtgtggggaccatccggattgaacagaagaaaaaagaaaatattgaaaagctgacatacgccgaggtcgtcaatgtgatagacggccaggtgctcggcggaaaagccggtctgcataaaacgttgaataagtttgtgatcggcgcgatggagcttgacgcgatgatgcgttatacggcggcggggaacctgttaatcgtcgggaaccgaatcaacgcccaccgtcaggcgcttgaagcgggcgcggctgttttggtaacaggagggtttaataccgacgacagcattatcgagctggccgatatgcttgagcttccgattctctccacgagctacgatacctttacggtagccgcgatgatcaaccgggcgatctatgatcagctcataaaaaaagagattgtgctcgtggaagacattttgacgcccgcagatcggacagtgacgctgtcccctaaggataagctggagaaatggtacgaaaaaaactatgaaaccggacacggccgcttcccggttatcgatcagcagatgaaaatccacggaatcctcacatcgaaagatatcgcggggcatgaccggtcagttccgattgaaaaagtaatgaccaaaaaccctgtcacggtgatcgggaaaacatctgtcgcctcagcggctcaaatgatggtttgggaaggaattgaagtgcttccggtgacagacgggcatcacaaattgatcggaatgatcagccgccaggatgtcttaaaagcgcttcaaatggttcaaaagcagcctcaggtcggggaaaagctggatgatattgtttcaaggggatttaaagaagacgaagatgacaaaacgccggccgtttatcaatatgaagtcacgccgcaaatgaccaatcagctcggcacgatttcttacggggtgtttacgacgattttaacccaggccgccagccgatttttacgctcccgcaaacgcggcgagctggtcattgaaagcattacgattttcttcctgaagcccgtacagatggagtcggtcattgaagtgaaaccgcgcattttagaggcgggccggaaattcgggaaaatggaagtggaagtgtcaagccaaagcggcatcgtttcaaaagcgatgctcatggtgcagctgatggagagaagttaagggacgcacccgggtcccttggcattcattatgcgtggtccctctccgcttcctttgcatggatgggctcataatgcttataggctctatacccggcccatgcgctgcctgctccgattaaaatgaagacgccgccgatgaccagagtcaggacggagtgaaacagaatcatttggtttactccgtacaaaaacaccagcgcgcctaatgccatacttgatttagccgaaaaacattctttctccagcgcccgtttcgtctggattccttttactttgtaatacacgtaaaagcaggcagaaagcccgatgagaaaaacaaaaaccagcataaatgaaatcctccattatatgagtttgcaaaaccgtttataccgttgctgaaagattttccttttccatggataaagagtatgattaaatgaataaaaacgaaaaggagaaagcgatgaaatccgaactgatcagaaccatatcattatatgacaccattatcttacatagacatgtgaggcctgacccggacgcctacggttcacagtgcggccttacggaaatcctgcgggaaacgtatcccgaaaaaaatatttttgccgtcggacagcctgagccgtccttgtcttttttatattccctcgatgaggtggatgacgaaacctataaagatgctcttgtcatcgtgtgcgacaccgcaaaccaaggcagggtcgacgatcagcgctaccattccggcgcaaagctcatgaaaatagaccaccatccaaatgaagatccgtatggcgatctgttatgggtcgatacgaatgcaagctccgtaagcgaaatgatctatgagctgtacctggaaggaaaacagcacggctggaaactgaatacgaaagcagctgagttgatctacgcgggtatcgtcggtgatacggggcgcttcttattcccgaacaccacaaaaaagacattaaaatacgcgggagagctcattgagttcccattttcatcgtcagagctgttcaatcaattgtatgaaacaaaattaaatgtggtgaagcttaacggctttatttatcaaaatgtgtcactgtctgaaaacggcgtcgcttccgtgttcattaaaaaagacattttggagacatatggaaccaccgcttctgaagcgtcgcagcttgtcggaacactcggaaatatttcgggtatccgcgcttgggtgtttttcgtagaagaagacgatcaaatcagagtccggttccgttcaaaaggtccggtcatcaacggaattgcccggaaatacaatggcggcggacatccgcttgcggccggcgcatccatcttcagctgggatgaaaccgatcagattcttgctgatctggaagaggtatgtaacgaacacaagtagaggggagaccctctttcttagtgttcatctgtcacggggatgaaccagcagccgaaatcagtcaggtcttcgtagacgcggagattacagatttggagttctttttttatgagggaagcgagtgtgtctgtttctgcatatgcggaatagccttgtctgattcgggctgcatgatcttttgccaagcgtcgttcactaaaaacctccattttcccttcctcccttcagaatcattgaaaatgtctcatctacagtttataaaaaagcggagaaaaaagcgacagatctatggaaaatttttaaaaatgacataattacgtcgcaaaagaaatatgaatttcgacagacaatctcgtataaatcgtcagttcctttacttcagctttaaattccttctcatttatggtgtatattttgttttcgatcgtccgttttaaaagctcctttgttttatacacgctttcaatatcttttgtgatgacttcagaaatgttatctttcacttgttcctcaaatttcatcttgtcaggctgggcgattctgtatttttccccattgatcagcttcacatcaacactttggatgagaagtctttgcttattatcctcatttaatttatgaagatccttctgatagatggagatttggttttttaaatcccgcgcgtgctcacgctgcttttcaattaacgtcacttgttcttcctgaaacgttccgtatgtaaacagaaagaacagccagctgacgatggctccgcacatcattcccgcgaaaaaacgctgccatcccggttttttataatactcgggaattctcatgatgacatattctcctgggtcagccatgaaataatcagccagccggtctgcgcgccgcccattgctgaaataattaaaagaagctgtttgaaaatgtcgcgcgtgttgccttcaaacagcccccgctcgaaactgtataccgcgtcaaatgttcccccgatcgccgcgacaagcgcccagatcttcagcctgttcgccaattttgtgatcgccgtcagcggaggctcgcctgataaataagctccgaggccgccgatcagcgcgccgccgagcaacacaccgagggcgataaaataactgctgatgaaattcgccataaatccggcttcctgatccatatatacaccacctcacttttctatcatattgagcgaaacggacaagtatgatgatgagtcaaaaaagaacatttgtttcttaagaaaacccgtcttataatgtagaaaggcaaaatgaacgtatgggaaaggagtggcggcattgtcttttgttcacctgcaagtacatagcggctacagtctgttaaacagcgccgcttctgtaaaagagcttgttacacaagcgaaggaactcggatattcatcattggcgctgacggacgaaaatgtgatgtacggcgccattgagttttataaagcatgcaaatcaaacggaattaagccgattatcggtctgacggcttctatatacacggacgatacggagcttgaagcacatccgctcattcttttagcagagacaaacaccggatatcagaacctggtgaaaatctcaagtgcgctgcaatccatggcaaagggcggcatgaagcgaaaatggatgaagagctatcatgaggggctgatcgccattacgcccggtgaaaacggctacattgaaagcctgcttcaagccgggaagtttgaagaagcagtccgggctgccgaaggattccgggagctgttcggagacggccgtttttatttagggtaccagccgtttaaaggacatgagacgttatcagaagagattctccgcctgtcagccgagacggaaatcgctgtctgcgctgcgggggatgtccgttatatcaagaaagaagatcaagatgcgtaccgctgtctgtgcgctattaaagccggagagaagtgggaggatcagagcgggaatctgccggacttatacttgagggcgcctgaagaaatggcagagctttacacgcggcatccggaagcgattgaagcagccgcgcgtatcgcccggcaatgccgggtcgatgtcagcctcggacagacacagcttccgtcttttccggcgccggacggcaaatcagccgatgactatttggcggagatctgtcatgaggggctgcgcctccgtttcggtactcctgatgagcgcgctgtccgccggcttgaatacgagctggacgtcatcaggcgcatgaaattcagtgattattttctcatcgtatgggactttatgaagtacgcgcatgaaaagggcattgtgacaggcccgggaagggggtccgcggcaggatcgcttgtcgcttactcccttttcattaccgacgtggatccgcttaaacattctctgctgtttgagagatttcttaatcccgagcggatcagcatgccggatattgatatcgatttccctgacacgagaagggatgaggtcattcagtatgtacaaaataagtacggggccatgcacgtcgcccagattatcaccttcgggacattggccgcaaaggcggcgttaagggataccgggagagtgttcggaatcagcccgaaagaagccgaccagcttgcccgcctgattccgtcaaaaccgggaatgacgcttgatgaagcgaggcggcagtccgctcagctgaagaggaggctgtccgaatccgccgttcttcataaagtgtttcagatcgcaaggaaaattgaaggtcttccgcggcacacgtcaacacacgcggcgggggtcgttctcagtaaagagccgctttcggaagttgtccctcttcaagaagggcatgacggcgtgtatttaacgcagtatgcgatggatcacttggaagatctcggtcttttaaaaatggactttttaggtttgcgcaaccttacgcttattgaatccattaaaacgatgattgaaaaagagacgaatacgaaaattgatttttccgagatttcttatcaggatgaaaaaacgttctcactattgtcaaacggtgatacgacgggtattttccagctggaatcatcaggaatgagaaacgtgctgaagcgcctgaagccgtcaagactggaagacattgtcgcggttaacgcgctttacaggccgggaccgatggaaaatattccgttatttatcgaccggaagcacgggcgggcgcgtgtggaagtgccgcacgaggacgtacgaaatattctcagtgacacttacggcgtcatcgtctatcaagagcagataatgatgatcgcctcgcgcatggcagggttttcattaggtgaagcggatctgctcagacgggctgtcagcaaaaagcaaaaggacattctggacagagagcgaagccattttgttgaagggtgcttaaaaaaggagtattctgtagtcactgcaaacgaggtctacgatctgattgtaaaattcgctaactacggattcaacagaagccatgctgtcgcatacagcatgatcggctatcagctcgcctatttaaaagcgcattatccgttatattttatgtgcgggctgttgacgagcgtcatcggcaatgaggacaaaatatcgcaatatctgcatgaagcgaaggggagcgggattcaagtccttccgccgtcaataaacaaaagcggttttccgtttgcgccggaaaacggagccgtcagatacagtttgcgggccgttaaaaacgtaggcgtctcggcagtgaaagatatttataaagcaagaacacataaaccgttcgaggatcttttcgatttctgctttcgcgtacccgcaaaaagcgtgaatcggaaaaccatcgaagcccttatattttctggcgccatggacgaattcaatcaaaatcgcgccgccttgctggcctccgttgatgtggctttagagcacgctgaactttttcgtgcagacgatgaccaaatgggattgtttttggaagaatcgttctccattaagccaaaatatgtagaggctgaggaatttccgctcgtggacaagcttcggttcgaaaaagaagctctcggtgtttatttctcaagccatcctttgtctgctttcagggatctcctgaaaaaacggggggcgcaagcgatcacagcagcgcggcagatgccgaaggggcagctgtcaattggcgctttgctcgcgggcattaaaacgattcggacaaagacaggtcagcatatggcgtttctcacattaagcgatgaaacgggagaaatggaagccgtcgtgtttcctgaccaatatagaaggctgtctccgctgttagaagaaggcgcgctattattcgccgccggaaaaatggaagagcgtcaggagaagacacaattcatcatgtcatcttgctctcttcttgagcagacggaggcagacagagcgccgtctgtttacatcaaaatcgaaggcatccggcacaatcaggagtttttggaaaagatgaagcgtattttactggagcataaaggggaaaccggcgtttatctatattatgaaaaagacaagcagacgatcaggctgccggatacttttcatattcaggcggaccatcaggcgttataccgtttaaaagagctgctgggccgcgaaaacgtcgtgttaaaatagtggtaacaataatcgttttgttatacaattgaaacaattgtgctatcttatttaaagattctgaaatttttcacctccagcgattgtaccagtctatgcggcagaatatgtaacaaagtacttaaaaggagtgtttagaatgtcattaagagaagaagcgttacatttacacaaagtaaatcaaggaaagctggaatcaaaagcaaaggtagaagtcagaaatgcagatgacttaagccttgcctactctcccggagtagctgagccttgtaaagagatttatgacgataaaaacaaagtatatgattatacaatgaaggggaacatggtagcagtcgtaacagacggatcagccgttctcggactcggtaatatcgggcctgaagcttcacttccggtcatggaagggaaagcggtgctgttcaaaagtttcgcgggcgtggatgcattcccgatcgcgcttgacacaaacgatgtggacaaaatcattgacactgtaaagctgcttgcaccgacattcggcggtgtcaaccttgaagatattgcggcgccgaactgcttcattatcgaagagcgcctgaaaaaagaaacaaacattccggttttccacgatgatcagcacggcactgccatcgtaaccgttgccggacttgtaaacgcgctgaaattatcaggtaaatccatgtcatccattaaagttgtggcaaacggagcgggagcggcaggcatcgcgatcatcaagcttctttaccatttcggcgtacgcaacatcgtaatgtgcgactctaaaggggcgatttacgaagggcgtccggccggcatgaacgcagtgaaaaacgaagtggcgaagtttacaaaccaagaccgcaacgacggttcgcttcaggatgtcattaaagatgcagacgtctttatcggcgtatcagtcgaaggcgcgctgacgaaagaaatggtggaaagcatggcgaaagatccgattatcttcgcaatggccaacccgaatccggaaatcatgcctgaagacgcgcgcgcagccggcgcaagcgtaatcggaacaggccgttctgatttcccgaaccaggttaacaacgttctggcattccctggaattttccgcggggcgcttgacgttcgcgcgactcacatcaacgaagaaatgaaaattgctgcggttgaagcgattgcttcccttgttacagaggaagaattaagcgctgattatgtcatcccggctccatttgacaaacgtgtggctcctgccgttgcgaaagctgttgcgaaagcagcgatggaaacgggcgtcgccagaattacggtcgatcctgaggaagtggctgaaaaaacaagacagctcacggtcatcggcgaataataacacaaaaatgaaatggcagcgcgttggaaaaaaacaacgcgctgctgttcaatatacggactgctggcatttttttaagggcaggtcttaaaaaaatttcagcagaatccttatttcttttgaaagcgctgacagataaggctgaacaacgctttttacggtatgaaatccgtccgtttccgtctgttttgaagcaaaaaatgtcgaatggaggatgacaccgtttgacaaaaaaagtacaatagtttcggtaaagttattattaagtctatctaatcggaagacatgcagtgaagagaacccttcacaaaagggaggtaatcatttgttaaaggatatattcacaaaaaagaaaaaatatgcttccgtgccgtctgagcaggcaaaacatgatgttccggaaggcattatgacaaagtgccccaaatgtaaaaaaatcatgctcacaaaagagttagataaaaacctgcgcgtctgcatgaactgcgggcaccatttcccgatgaatgcaaagcagcgcattgaaagcctcctggatgaagattcattcgaagaattcaaccagggaatgatatctgaaaacccgctcggtttcccggaatacttagaaaaaatcgaaaaagaccgtgagaaaacatcgctgaatgaagcggtggttaccggaaaaggaaccatcagcggattcccggccgtgatcgcgatcatggattcaacattccgaatgggcagcatgggttcggttgtcggcgaaaaaatcacgcttgcaattgaaaaggcaaaagaggaaaaagtcccgtttatcatctttaccgcttccggcggcgcacgtatgcaggagggggtcttaagtcttatgcaaatggcaaagacaagctctgcattaaaattgttcagtgaggagcagggactgattatttctgtcatgacccatccgacgacaggcggcgtatcggccagtttcgcgtctctcggtgattataatttcgctgaaccgggcgccttgatcggatttgccggaagacgtattattgaacagacgatcggggaaaaactgccggaagatttccagacggcggaatttttattaaagcacggccagcttgatgcggtgattcaccgaaacgacatgaaagacaaactcgcatttctgctggacatgcaccaaacaggaggtgagcatgagtggctgcaagattagaatttgaaaaaccagtgattgaactgcagacgaaaatcgccgaactgaaaaaattcacccaagattcggagatggatttaagcgctgaaatcgcaaggcttgaagaccggctcagcaagcttcaggatgagatttataaaaacctgaagccgtgggacagagtgcagatcgcacgccttcccgaccggccgacgacgcttgattacattcaatacctgtttaccgacttttttgagtgccacggagacagaacatacggagatgatgcggcgattgtcggcggagtcgccaaatatcacggcatgccggtcaccgtcatcggacatcagcgcggaaaagacacgaaagaaaaccttgtccgcaatttcgggatgcctcaccctgagggctaccgcaaagcgcttcgtctcatgaagcaggcggataaattcaaccgcccgattatctgcttcatcgacacgaagggagcgtacccgggtaaagcggcggaggaacggggacaaagtgaagccatcgccaagaacctgttcgagatggccggcctgacagtgcctgtcgtttgtatcgtcatcggggaaggcggcagcggaggcgcgcttgcgttaggtgtgggcaaccgcatgctgatgcttgagaactcgacgtattccgttatttctcctgaaggagccgcgtccattttgtggaaggactccagccttgcgaaaaaagcggccgaatccatgaagattactgcgcccgatttattagaattaggaattattgacgatatgattaaagaagtgaagggcggagctcaccacgatatcaagcagcaggcgggctacattgacggtatacttaaagaaacgttaaaatctcttcttcaattgaacgccgaagaattgatctcacagcgctatgaaaaatataaagcaatcgggaaagtttcggttgaggatcaatatatcggggtaaactgaatagacgtgaagcctatggctcacgtttattttttgtgatttttgtgatattccttaaattttatttaaaaacaatttatttaattgtataataggtaaggtttcatgggagctcaggcgtcccttttcattgttttagggcaatgatcatgatatgtttaacatatatatgttgctgaggtgaataggaaatgaagcgtataggagttttaacgagcggcggggattccccgggtatgaacgctgcggtgcgcgcggttgtgcggaaagctatctaccacgacgtcgaagtgtacggaatttataacggttattcaggattaatcagcggaaaaatagagaaactggagcttggttcggtcggtgacatcatccaccgcggcggaacaaagctgtatacggccagatgtcctgaattcaaaacagttgaaggccgtgaaaaaggaatcgaaaatttaaagaaactcggcattgaaggtcttgtcgtcatcggcggagacggttcatacatgggtgcgaaaaaattaacggaacacgggtttccgtgtgtgggtgtaccgggtacgatagataatgacatcccgggaactgattttacgatcggatttgatacggcgttaaacaccgtaattgatgcgattgataaaatccgtgacaccgctacgtctcatgagcgtacatacgttattgaagtgatggggcgccatgcgggcgacattgctttatgggcaggtcttgcaggcggagcggaatcaattttaattcctgaagcggactacgatatgcaggaaattatcggccgtttgaagagagggcacgaccgcggcaaaaaacacagtatcatcatcgttgcagaaggggtaggcagcggggttgaattcggaaaacgcatcgaagaagaaacgaaccttgaaacacgggtatccgttttagggcatatccagcgcggcggatctccaagcgcttctgaccgggttcttgcaagccgcctcggcgcttacgcggttgagcttctgcttaaaggaaaaggcggacgctgcgtaggtatacaaaacaacaagcttgtagaccatgatattatagaaattttagaatcaaaacatactgttgaaccaaacatgtatcagctttcaaaagaactgtctatttaaggcggaagaagctgaagatttcagaaggaagtgaacgagttgaaaaaaacaaaaatcgtttgtacaatcggtccggccagtgaaagtgtagaaatgctgacaaaattgatggaagcgggtatgaacgttgctcgtctgaatttttcacacggtgatttcgaagagcacggcgcaagaatcaaaaacatcagagaagcaagcaaaaagctcggcaaaaacgtggggattctcctcgatacgaaaggtccggaaatccgcacgcacgatatggaaaacggcgcgcttgagcttcaggcgggaaatgaaattatcgtttctacgaaacaggtgctgggaacgcttgaaaaattctcagtttcttatgaaggcctggcagacgacgtgtcagcagggtctatcatcctgttggatgacggtttaatcggattggaagtgctagaatcaaatccggaaaaacacgaaatcaaaacaaaaatcttaaacagcggcacgctgaaaaataaaaaaggcgtaaacgttcccggcgtcagcgtcaaccttcccggaattactgaaaaagacgccaaagacatcgtattcggtatcgagcaaggcgttgatttcatcgctgcgtcatttgtacgccgttctacggatgtcctggaaatccgcgaactgcttgaagagcataacgcgtctgacattcaaatcattcctaagatcgagaaccaggaaggcgtggacaacctggatgcgatcctggaagtatctgacggcttaatggtagcgcgcggagacctcggcgtagagattccggccgaagaagtgccgctcgtgcaaaaagaaatgatcaaaaaatgcaacgcgctcggcaaaccggttattactgcgactcaaatgcttgacagcatgcagcgcaaccctcgtccgacacgcgctgaagcaagtgacgttgccaacgccattttcgacggcacagatgctatcatgctttccggtgagacggctgcgggacaatatcctgtcgaggcggttcaaacaatgtttaacatcgccacacgcacggaagaatctctgaactacaaagaaattctgtctaaacgcagagatcaggtcggcatgacgattaccgatgcgatcggccaatcagttgcgcacacggcgatcaatctgagtgcggcagctatcgttacccctacagaaagcggccatacggcgcgtatgatcgcgaaataccgtccgcaggctccgattgtagccgttacggttaatgagtctgtatcacgcaaactcggccttgtattcggcgtatttccggcaagcggccaaaacgcgaattcaaccgatgaaatgcttgaagacgcggttcaaaaatcacttgacagcggcatcgtgaaacgcggtgatctgattgtcattacagcaggttctgtcggtgaatcaggcacgacgaatctgatgaaagtccacactgtcggcagcgttatcgcgaaagggcaaggcatcggacgcaaatctgcattcggtccggtcgttgttgcaaaaaatgcgaaagaagctgaacaaaaaatgacagacggcgcagtattggttgcttcaagcactgaccgcgacatgatcgcttcacttgaaaaagcatcagcgctcatcactgaagaaggcggtctgacaagccatgcagccgttgtcggtttaagcttgggcattccggttatcgtcggtctggagaacgcaacttcagttttaacagaaggacaggttatcacagttgacgctgcccgcggcgctgtgtatgaaggccgcgcaagcgttctttaaacagctttaaaaaagagaggggggttctcccttctcttttgtctttaggctgatttttctattcccatgcgggcggtgacgcgcttttagaagggcaggagggcagaaaaatgagagtgttattcttactgtttatcgtgtgtccggcaattgaaatcggtttgtttctgctggcgggaaaatggctcggtatttttccgaccttccttctcatcattttgacaggcgtgttaggcgccttggtggcaaaaagacagggaaccgatgtgtatcatcgggtgatgcgcgacctgcagcacggcaaaatgccgggggaagcgcttcttgacggaatatgcgtctttttcggaggcctgcttttgatgcttccgggttttctgtccgatattgcaggggcctgtcttctgattccgttcactcggaaccgcatgaagccgcttttgttcaaatggctgagaggaatgtcaaaaaacaagcggatcattatcaaataaaaacggcagccttcttacagggctgctgtttttatttggactgaacagtaatataggcccatatttcttttaaagcgcccgttgtgataaaggcctgaatgaaaacgagcagcgcgggccccgcagccagtcctaaaattccgaacaatttaaagccggcaaacagagcgattaaggtcgcaagcggatcaagtccgattgacttgcttaaaattttcggctccgtcagctggcgctggataagaaccacaatatataaaacaccgagaccgatcgcttgaggaagctgaccggcaatggccaaatacataatccagggaacaaagaccgacccggcgccgagatacgggagaaggtccaccaggccgataaaaaaggagatggttgccgcatgctcaatccctaaaagaaaaagtccgataaagacaatgatcatcgtgaaaagtatgagcacggcctgcgccttaatgaaacctgccatcgcttttttcagctctcccgatacggccttggcgtttgccgaaacccgttccggaaaaatggaataaagcagcgccttcagcttatgccagtcctttgtcataaaaaaagtcgccagcattgcgaaaatgaagacggcagctgtattgggaaggaaggcaatccatttcggcaccagctccaaaagatgtgaaagcatgagccccgcatttttagctgctgtatcaccgagggtctgaatatgcgtcacgatggatgcctgctgattggtttcaagcccgttaaataagacggtcagctcgtggtacaatggctggatgcgggaagtgaacagctcttcgcaatacgtcataaaggcgctgatatggggagggagcgttttggccagataggcggttcccgaaatgatttccgcaacgagaaatgtcgccgcgccgagaagaataagcaaaaagaagaccaggacaatgactgtattgactgatcggggcatccccgtcagtttgtccagccagtcaactacgggaatgatcgctgatgacagaataagggcgatcagaaacggataagttaacggaaatgaggcgtaaccggccgctaaagcgccgccggccgcagcgagtacaaacagcgcgcggaaaaaaacagttgcatagtgcggattcacatcgatcctcctctcggtcggcacgtcctattacattagtttattcgtcaaaaaaaaggatatgaatacagatatgatgaaagaaggtgctttcaggatgtttacacaggcgaatttatttttactattattgctggccatcgcattggtagccaaaaatcagtcattgctttttgccgtcggctttctcattgtgataaaagctgtcggtcttgatcagaaactatttccggttattcagtcaaaaggcatcaactggggagtcaccgtcattacaatcgccgttttagtgccgattgccacaggcgatatcggttttaaacagctcggagaagcgatgaaatcatattatgcgtggatcgctctcggtgccgggatcgcggttgccttaatcgccaaaaacggtctcaccttattggaaaacgaccctcatattacaacggcgctggtcatcggcacgatacttgccgtcgcgcttttcggaggcgtcgccgtcggcccgttaatcggcgccggaatcgcctacttggccatgcaaatcgttaaaatgttcacttcgtaaagtaaaaaagcggcgtaaagctgctttttttgtggagaaaattagagtttgcaccttcgcattttgtagttcagacaaatgccatttgcattattccgatgaatgaagcggcttaccatgtaacaaagaacttcgggattgacggcgcacatggagcgaaaacagcgattgcagtagattaaaagctgatgggatttatgggcctgataccaaagcaaaacttgaagtgttgttaaaataagcggagaccctctttccttcaatttgaaagtttgttagatttataatgagaatgaaaaaacacaattcggttggtagtccggatgcatgatttaaaatgtcagtaaccttcccctcctcgggatgtccatcattcttcagtaaatttaggaggagggaatcgttatgaaattaacggtttactacgatggtcagttttgggtaggagtcattgaagttgtgaatgacgggaaattaagagcaattcgtcatttgtttggacaagagccaaaggattcagaaataatgcattttgttaataatcaacttttacagactctctcccacactgaacaagaaggggtttgtgttaaagcaaaatctaagaaattaaacccaaaaagattgcagcgacaagcttctaaagagatgaaaaatatcgggatatcaactaaggcacaaaaagcgataaaacaggagcttgaagcaagaaaagaaaagaaaaaacaactgaatagaaaacaaagagaaaaaataaaggaacaaaaatatttaatcagaaaacaaaaagcaatagaaaagcataggggaaaatagttggagagcccgatgaagcccttcgattgaaaagttgagcggcatcagttagtttcttcggactgatttagagaaaaagaagtataagtcagagcccttctcgagatgaggagggtttttctgccatttatttaaattcacttatatcagtaaatgagtcagtttcaattgatgaacggtttgataaggatatttacagcccgaaaacagcgcaaatgcagtcaaacgattccagtccatgtgcggcatgactgctgacggcatttattggccaaagacaaagatgaaaatcagcgttaaagaaacaggaaaaattagataaagaacgaaaaaaaatttctaaatatagttggattggtatattattgaaccctgcatatgtgctaacaatagcagctttaaataggtgtaacagcaggtaaattactaaagaatctaaggttagtatttgggttctaatatttgggtagggggaaataatgctatcacttaatagagctttaaaattacgtgatttagaagtttttcgtgtgctgaaagatggtaacattttatcttacgtaataattgaagatactcgaaagccatttacagaagaagacaaaaaattagaaccactgtgttatatggacgaagaagatattaatgcgattttaaacgtttttaagatttcaattgttaatgatgaaaaattaaatgaagatgattcaatttttataagatcttacttttctgaatttgttaatcatacaaatttaacgaattttattattaaagaatatgttcaaaagaatttatatgattacgatgatgaagatgacatcattttttttaatagaattttacgtagtataggatcagattatgttatcaaagaatttgacgatataaattggatttatttatctcaagattgatttcttatttagattttgaaggagtacagaagataatttctgtactcctttttaaggcgaaaaatagacttctagtttctcttatagcataaatacacttgacaaaatcgtaagttcagcacgcgcaaggagtgtatataagtgctttattgtcatggatgttctatttccaaaatcgctatcaattttttgttattttcggttaattaggaaaattgcggtatttttcgtttacagaaaataagaaaatagtggaaaataaatcaaaagaggaggaggggaatgcatggtggagtctcaacttcaaatacagcggggggattgtttgtatgaatattaaaaaagcaatttgtttctctgtctctgctttcgctattacgttcggtgtaattgcttttgtaggaaacacgactcatcttcaccataatgcagccaaaactgataacgaggtaatacaactagctgcgcgactgcaaacatgatttcgaaacaaaaaagatgtggcctttttagggctgcatctttttttgtcatgtattttcgttttttctctttttaggcggggctgcggctgctgcatttataagcatgtaacaggttatgttgcttcaaagggtgatattcgtttgaagtccgcagaaaaatggatcgttctatacacaaaagcgaaatacgaagtaacaacaaagatatatataagaaaatttgagccaactaaaaccaagacatggatttctgaagctgatccgaacattgattcagtcgagtaaacaaaataacccccttctccggtaaagaaggggggttaaatttgcggtgaagttgtcgcgcctgtccttttaaagtctcctccaaaactcccccaaatgaaaacatgagaatacatggttttacaaagcgcctgaaagcaaacgattaaatttatcaacgccaagccttgatatatagggcttttaaaacatttttagttaaaagtctacaaattaatcagattattgtttataataagaataggcttaaacttaaataagcttataagaatttgttatgttcctctataagcatatcggttatgtaaccgcaaccagtgaaatgtaagcattttcttgaaggggaaagggagtgtttgcatgactcattttaagtaagccgtatgttttatatactctttaaaggggaattttgattgaaaaggagaggttgaatatgacagcaacacgcggtcttgaaggggttgtagcaacaacatcatctgtaagctctattatcgacgatacccttacatatgtagggtacgatattgacgacttgacagagaatgcaagttttgaagaaatcatttatttgctgtggcatctgcgcctgccgaataaaacggaacttgctgaactgaaaaaacagcttgcgaaagaagctgccgttccacaagaaatcattgagcacttcaaatcctatcccctcaataacgtacatccaatggctgctctccggacggcgatttcattactcggtctgactgacagtgaagccgatgccatgaatccggaagcgaactacagaaaagccatccgtctgcaggcgaaagtgccgggcattgtcgccgctttctcaagaatccgcaaaggacttgatcctgttgaaccgaaggaagagtacggaatcgcggagaacttcctttacaccttaaacggtgaagagccttctccgatcgaagtggaagcgtttaacaaagcgctcattcttcatgcggatcatgagctgaacgcatcaacatttacggcgagagtatgtgtcgccaccttatctgatatttactcaggcatcactgccgccatcggcgctttaaaagggccgcttcacggcggagccaatgaagccgtcatgaaaatgctgacagaaatcggcgaagtggaaaacgccgagccttatatccgcagcaaaatggagaaaaaggaaaaagtaatgggcttcggacaccgtgtgtataagcatggagacccgcgcgccaaacacttaaaagaaatgagcaaacgcctgacgaatctgacgggtgaaagcaaatggtacgatatgtcaatccgtgtcgaagaaatcgtgacgtcggagaaaaaactcccgcctaacgttgatttctattccgcatctgtataccacagtctcggcattgatcacgatctgttcacgccgatctttgcggtcagcagaatgtcaggatggatcgcccatattcttgaacagtacgataacaaccgcctcatccgcccgcgcgctgattacacgggtccggataagcagacttttgttccgattgatgaaagagcctgatcaaacgggaggctggtgattttcatgtcgttagcctcttgttaatcaagcccggattggtttacaattttgatagaatcttgagaaaagtcattttattttctatacaagaaaaataaaatgttttctaaatatgaattacatactgggaggtaatattgtgtcacaaggtgaaaaaattacagtctctaatggagtattaaacgtaccaaataatccgattatcccgtttattgaaggcgacggcacaggccctgatatttggaacgccgcttctaaagtattggaagccgctgttgaaaaagcatataaaggcgagaaaaaaatcacatggaaagaagtttatgccggtgaaaaggcttataataaaacaggtgagtggcttcctgccgaaacgctggaagacatcagagagtacttcatcgccatcaaaggtcctctgacgacaccggtcggcggcggtatccgttctctgaacgtggcgctgagacaggagcttgatttgtttacgtgcctgcgccctgtcagatatttcacgggagtgccttctccggtcaaacgacctgaagatacggatatggtcattttccgcgagaatacggaagatatttacgccggaattgagtatgcgaaaggttctgaagaagttgaaaagctgatcagcttcctgcaaaatgaaatgggtgttaacaaaatccgtttccctgaaacgtcaggaatcggcatcaaacctgtttctgaagaaggcacaagccgcttagtcagagctgccattgagtatgcgatcgaaaacggccgtaagtctgtcacgcttgtccacaaaggaaacatcatgaagttcactgaaggggcatttaaaaactggggctatgagcttgccgaaagagaatacggagataaagtattcacttgggctgaatatgaccgcattgtcgaaaaagacggaaaagaagcggctgataaagcacagagcgacgcggaagcggcaggaaaaatcatcgtcaaagacagcatcgctgatattttccttcagcagatcttaacccgtccgagcgaattcgacgtcgtggcaacaatgaacttaaacggagactatatctctgatgcgcttgccgctcaggtaggcggaatcggaatcgcgccgggagcgaacatcaactatgaaacagggcatgcgattttcgaagcgactcacggaacggctcctaagtatgccggccttgacaaagtcaacccgtcatccgtcatcctttcaggagtgcttcttcttgaacacctgaactggaatgaggctgctgacttgatcattaaatctatggaaaaaacgattgcttcaaaagtagtaacgtacgattttgctagattaatggacggcgcaactgaagtgaaatgttcagagtttggtgaagagctaattaaaaacatggactgaacctaaagcagacttctaatgaagccaaaaaaggagaagagaatcatgggaaaaacacgcagtaaagtttctgttatcggagcaggatttacgggagcgacaacagcctttcttacagctcaaaaagagcttgcggacgttgtgctcgttgatattccgcaattagaaaacccgacaaaaggaaaagcgctagacatgctcgaagcaagtccggttcaaggatttgacgcgaaaatcacaggcacgtccaactacgaggacacagccggttctgatatcgtcgtcatcacagccggaattgcgagaaaaccgggcatgagccgtgatgatctcgtatctacaaacgaaaaaatcatgagaagcgtcacacgtgagatcgtgaaatattctcctgactgcattatcgttgtattgacaaaccctgttgatgcgatgacatatgcggtgtacaaagaatcaggcttcccgaaagaacgcgtcatcggacaatccggagtgcttgacactgcgcgattcagaacattcgtcgctgaagaattaaacctgtctgtaaaagatgtgaccggttttgttcttggcggacacggtgacgacatggttcctctcgtccgttattcctatgcgggaggcattccgcttgaaacgcttatcccgaaagaccgtcttgatgcgattgtagaacgtacaagaaaaggcggcggggaaatcgtcaaccttctcggcaacggaagcgcctactacgcgcctgctgcatcactgactgaaatggtagaagccattttgaaagatcagcgccgcgtgcttccgaccatcgcttacttagaaggcgaatacggtcatgaaggcatttacttaggcgtaccgacgattatcggaggaaacggcctagagcaaatcatcgagcttgaactgacagactatgaaaaagcgcagctgagtaaatcagttgaatctgtcaaaaatgtgatgaaagtattgtcataagaaaaaagggaaggcttccgaatcagaagccttcctctttttacaattaatgaaagcgttttctttttccctgagcgatcctttctctgaaaatgatcaaaaaggcgaattgtctgaacgggcagtattggataaaatgaaatcataaagtgatatgcagcacataaaatagagaaaattggatgtcggggaaaatagacagcggagggcgcagcatgaacaaaaaaattttagttgtagatgatgaacaatctatcgttactcttttacagtataatctggaacggtccggctatgatgtcattaccgcatcagacggtgaagaggctctggagctggcagagaatgaaaatccggatttaatcgtactggatgtcatgctgccgaaagtggacggaatcgacgtctgtaagcagctcagacagcagaaaatgatggtcccgatcttgatgctgacagcaaaagatgaggagtttgataaagtgctgggactggagctcggagcggatgattacatgacaaagccgttcagtccgcgggaagtcactgcgcgggtgaaagccattttaagaagggctgacatttcttcgctgtcacaaggcagagaagaggaaaaggacgggcagatcctcatcggtgagctgaaaattcttccggagcattacgaagcgtactttaagtcagaacagctggaattgacacctaaagaatttgaactgcttctgtatttgggaaaacataagggaagagtgctgacgagagatcttctgctgagcgcggtctggaactatgattttgccggggatacccggattgttgacgttcatatcagtcatctgcgcgacaaaatcgaatcaaataccaaaaaacccatctatattaaaacaatcagaggtttggggtataaactggaggagccaaaaatgaatgaataaagtccgtgtgcgtctgttcgctttactcgttgtatgtatcatattggttttcagtgttctcggcctttttttacagcagcttatttcttcatccgctgaagaaagaacggcggatcagctgaaaaaggaatcggtatacatagcgggccttcttgacgccggcagaatcggcaataaaagcaatgaaacggtaatccgtgacgccggccgcaccctgggtataaacgtctccgtgctcaatgagaagggggacgccgtatatcattccggcagtcgtgctgatgattcagccgtaaaggagttcatttctcacaataaaagcgaggaagccgtacagtcgaaaaccaaagtcatccgcggcactgccgtaaaaaatgacgccgggaaaattgcggggtatgtactcgtttccgctgagatcaacggcggttcaagcgttaccggagaaatgtggggcatgctggcagcaagtctttgtaccgcttttatcattatcgttttcttttatacaaacatgacgtcccgttacaaaaaatcaatcgacgccgcgacaaaggtggcgacggagctgtccaaggggaattatgacgcccgctcctacagcggttacgcaaggcggtcggaccgtctcgggcgtgcgatgaacagcctggcggtcgatttaatggaaatgacgagaacgcaggatatgcagcgcgatcgtctgttaaccgtcattgaaaatatcggatctggtttgattttaatagacgggagaggttttatcaatctcgtgaaccggtcatacacgaagcagtttcatacaaagcctgaacgtctgcttcggcgcctttaccatgatgcgtttgaacatgaggagatcattcggcttgtcgaagacatttttatgacggagacgaaaaaatgccagctgctcagacttcccatcaacattgagcggcgctactttgaagttgacggcgttccgatcatgggccctgacgatgaatggaagggcatcgtcctcgtctttcacgatatgacggaaattaaaaaattggagcagatgagaaaggacttcgtcgccaatgtctcccatgaactgaaaacaccgatcacctccattaaaggctttacggaaacactgttagacggagcgatgaaagacgaaaaggcgctttcagattttctgtctatcattctgaaagaaagtgagcggctccaatctctcgtgcaggatttactggatttatccaagatggagcagcaaaactttacgatgcgcgtagagtcctttgacgccgcaaaaattctgcatgaaattgaagcgcttttgcggcataaggctgaggaaaaaggcatcagctttcagctcgatctcccggaagagccgatttttgtgacgggtgatgcgcacaggctgaagcaggtgtttttgaatctggcgaacaatgccctgacctacacgcctgaaaaagggacggtggggatttcggtacatgtgaaagaaaccgttgtcgatatcaaagtgtccgatacgggaatcggcattcagaaggaagagatcccgcggatatttgagagattctaccgcgtggataaagacagaagccgcaactcgggaggaaccgggctcggcctcgccatcgtgaagcacttaatagaagcccatgaaggtaaaatcgaggtcacaagcgagccgggacaggggactgtatttaccgtgacgctgaagcggcagccggaagcgtgaccagctttacaaaggattaacaatttcttcatgacctgttaaacctatcttgttaggatataacagaaccccttcatccaaggagccaattttgacggcgggaacgtgttttcttgttcccgtccttttttgcgttttcacggggttcgctcattttcctttcaaattgaactttgttaaaataagagaagctgtgagattaaaaaatagaggaatgacgagcttttgctcttaggaggatattgaatgacggaacgaaaaaaattagtgcttgtcgacggaaacagtctggcgtaccgagcgttttttgcattgccgcttttaagcaatgaaaaaggcatccatacaaatgccgtatacgggtttgcgatgattttaatgaaaatgctggaagatgaaaagccgacccacatgctggtggcttttgatgcgggaaaaaccactttccgccacagtacgtttaaagaatataaaggcggaagacaaaaaacgccgccggagctttcagaacagatgccgttcatccgcgagctccttgatgcctacaaaatcagccgctacgagcttcctgaatatgaagcggacgatattatcggcacccttgccgtatctgctgaaaaagaaggcttcgaagtaaaggtagtttcgggggacaaggacttaacccagcttgcaaccgggaaaacgaccgttgccattacgagaaaaggcattaccgacgtggaagattacacgccggagcacgtgcaagaaaagtacggtctgacccctttgcaaatcattgatatgaagggattaatgggggattcatccgataacataccgggcgtccccggcgtcggagaaaaaaccgcgattaagcttttaaagcagttccattcggttgagaaactgcttgattccattgatgaagtcagcggaaaaaaattaaaagaaaagcttgaagaatataaggaacaagccctgatgagcaaagagctggcgacgattatgacaaatgcgccgattgaagtcaagcccgaagatttagattaccaagggtttgaccgtgaacaagttgttgccatttttaaagacctcggttttaatacgcttcttgagcggctcggtgaagaaagcggcgaaacggcggaagaaaattttgaagacatcaatgttgaaacggcagaagaaatcactgaagatatgctcgtttcgccgtccgctttggttgttgaacaaatcggtgataactatcacgaagaaccgatcctcggcttttccatcgtgaatgaaacaggtctttattatattccgaaagaaatcgccattcagtctgaaacttttaaatcttgggctgaagatgaatcgatgaaaaagtgggtgttcgacagcaaacgttcagtcgtcgctttgcgctggcagggaattgagctgaagggaacggaatttgacgcgcttcttgctgcctacattataaacccgggcaattcgtacgacgatgtcgcgagcgtagcgaaagaatacgggctgaatatcgtttcaaaagatgaagcggtatacggaaaaggcgcaaagcgcgccgttccggctgaaaaagagcttgccgatcatctcgcgcggaaagcgtctgccgttaacagcctccgtgacaaactgctgcatgcgctggaagaaaataatcagcttgaattatatgaagatctcgaactcccgcttgcgctaattctcggagaaatggaatcaatgggcgtcaaagtggatgttgaaagactgaagcgaatgggcgaagagctcaaggcaaagctgaaagaatatgaagaaaaaatccatgacatcgccggtgagccgtttaacatcaattcaccaaaacagctcggcgtcattctgtttgaaaagctcggcctgccgccagtaaagaaaacaaaaacaggctattccacttcagccgatgtgcttgagaagctcgcagacaaacatgatatcgtcgcgcacattctgcaatacagacaaatcggcaaactccaatcgacttatattgaagggctgctgaaggtcacgcgcaaggattctcataaggtgcatacacgattcaatcaggcattgactcaaaccggacgcctcagctcaacggatccgaacctgcaaaatattccgatccggctggaggaagggcggaaaatccgtcaggctttcgtaccgtccgaaccggactggcttattttcgccgccgattattcacaaattgaattaagggtgcttgcgcatatttcaaaagatgaaaatctgattgaagcgtttacgaatgacatggacattcacacaaaaaccgccatggacgtgtttcatgtcagtgaagatgaagtgacacaagcgatgcgccgccaggcgaaggccgtcaatttcggcattgtttacggcatcagtgattacgggctgtcacaaaacctcggcatcacccggaaagaagcgggcgcttttatagaccgctatttggagagcttcccgggcgttaaggcgtatatggaagaatcggtgcaggaagcgaagcaaaaaggatatgtcacgacccttatgcagcgccgccgctatattcctgagctgaccagccgcaacttcaacctgcggagctttgcggaacggacggccatgaatacgccgattcagggaagcgccgccgatattattaaaaaagccatgattgacatggcagctgagctgaaagaaaaaaacctgaaggcgcgactgctgcttcaggtgcacgatgaattgatttttgaagcgcctaaggaagaaattgaaatattagagaagctggttcctgaagtgatggagcatgctttggcattagacgtgccgctgaaggcggattatgcttcagggccgtcttggtacgatgcaaaataaacagagaaaaaggaagtgatgattgtgccggaattaccagaagttgaaacggtccggcgcactctgaccggtcttgtgaaggggaaaacgattgaatcggcggatatcagatggccgaatatcatcaaaaaacccgctgagccggaggaattcgcgcggcagattgcaggagaaacaatccgatccatcggaagaaggggaaagtttttgcttttccatctggatcattatgtcatggtgtcccacctgcggatggaggggaaatacggtcttcatcaggccgatgagcctgacgataaacatgtgcacgtcgtgtttcacatgacggacggaacacagctccgctaccgggatgtccggaaattcggcacgatgcatttgtttgcgccgggagaggaacagaatgcattaccgctttcacagctcgggcccgaacccgatgatgaagcatttaccgctgcttatttaaaagagcggcttgcaaaaacgaaccgcgcagtgaaaacagccctgctcgaccaaaaagcggtcgtcggcctcggcaatatttatgtcgatgaagctttattccgggcgcgtattcatcctgagacaaaagcgaacagtctgtcagacgggcagataaaaacgcttcatacagaaattaaagacacccttcaggaagcgattgacgcgggcgggagcaccgtccggtcttatatcaattctcaaggggagatcggaatgtttcagctcaaacattacgtatacggcaaaaaggatgaaccgtgcaaaacgtgcggcacgatgatttctaaaatcgtggtcggcggaaggggtacgcatttttgcgcccgctgccaaaaaaaatcataaactgaagctgttcaagcaggcggcagcagaatgacttttttctaacacagttgatgacctttctccatatatatattgtgattcacccaataggcatatgtcacaattgccgatcaagagaaagggagaaacggatatggagattgtttctttgctgcttttggcttttgctgtcagcttggacagtttttcagtcgggtttacgtatggtttgagaaaaatgaaaatcccgttcaaagcgattgccgtgatcgcttgctgttcagcctctgtgatgtttatatccatgctgatcggccattttctgacaaagatttttcccgtatccgtcacggaaaaactgggcgggctgatcttaatcggaatcggggcatgggtcatctggcaatttttcaaaccggctaaagagccggattacttattgcatgaaaaaacgttacttaatcttgaagtgaaatcgctgggcatcgtcattcatattttgaaaaaaccgaccagcgccgatattgatcaatccggaaccattaacggagtcgaggcgcttctgctcggtatcgccttatccattgacgcgtttggcgccgggctgggagcggccattctcggcttttctccggttatgatgagcgtgactgtcgggctgatgagctcgctgtttgtttcactcggcataaacgcggggcatttgctttcaagatggaattggatagataaaatgacatttttgccgggagtcctgctgattatcatcgggatttggaaaatgtaagaaggagtgggctttttgagcttggtcatcggtttaacgggaggcatcgcaagcggcaaaagcacggtagcgcgtatgctgatcgacaaaaaaataacagtcattgatgcggatgtcatcgcaaaacaggcggtggaaaaaggaatgccggcttacggacaaattgtggaggcattcggaaaagacatcctgctggaaaatggcggtattgacagaaaaaaactcggttctatcgttttcactgacgaacagaagcgtctgaagctgaatcagatcgttcatccggcggtgcgtgcggaaatgctgaaacagcgggatgaagccgttgcgcgaaaagagcagttcgtcgttttggatataccgcttttgtatgaaagcgggcttgattatcttgtcggcaaggtgctcgtcgtcaccgtaccggcagacattcagcttaaacggctgatagagcggaattcccttacagaagaagaagcgatgagccggataacgtcgcaaatgcctttagcggataaaacaaaaaaagctgacgccgtcattgataacagcggcagtcttgaatatacaaagcaccagcttgaggaagtattgagcagctgggcataaacaaacaccgttcggaaagccgaacggtgtttttctggttaaaaatcaaaattgtcagggtccggaccgacacggaggttttcgttcagatcatcaatccgcttcatatcgtcagctgacagttcgaaatcaaagacatttgcattttcttcaatacggtgttttttagttgatttcggaatggtgatgacaccgttctgcaaatcccagcgcaaaatcacttgagcggctgatttgccgtacttctcagcgatttcctgtaagacggtgtgatcaagcagctgaccttgcatcaatggcgaccacgcttcaagctgaatgccttgttcagtgcagaaagcaagcagttctttctgtgtcagacgaggatggtactccacctggttgatcatcggcttgatttccgtctctttcatgagatgtttcaggtggtgaatttggaaattgctgaccccgatcgccttaatgcgtccatcccggtagagggtttcgagcgcccgccacgcatcgatgtactttccttcgacaggccaatggatcaaatataaatccaaataatctaaaccgagtttttctaagcttgtgtcaaacgcttttaacgtttcttcatatcctaaatcggcattccatacttttgacgtgacaaaaatgtcttcacgttttaaccccgcttcttgcagcccttggcggatgccttcgccgacaccttcttcatttccgtaaatcgcggcggtatcaacgctgcgatagccgtgcaccaatgccgttttcaccgcgttgacgagttccgcgccttcctctactttgaaaactccgatgccgaaccaaggcatctctactccgttatgcaatgttgcttttgcttgtaaatgtgttgtcatgtatatattcctcctattagttgtctgttgaaacaatcaaaatgcgctgaagaaaaactcacctcctttcaagggcagtgcgatcccgcttttcaagcttcctgctccatccggttaatacgaccgcgctgagcaccatcagcgccccgatccaagcggtatgaatgattccgattgagtctgtaatgattccgccggcaaacgagccgatcgcgattccggcattaaatgccgcgatatttaaggctgatgctgtatcaacggcgcttggcgcaaaacgttcactcagcatcacaacatatacctgaagccccggcacattcataaacgccaacagccccatgaaaataatggtgatcagcccggctgttttaaacggtgcggtaaaagtcagaacaaacagcacagcagcctggacaatgaacatataaaacaaggctttcagcggatttcggtttgataaacggccgccaatcatgtttccgatggcaatcgcaattccgtaaacgagcaggatggccgcgacggtttctttctgaaaaccggttacctcctgaagaagcggagataaatacgtaaacacgacaaacgttccgccgtagcctaacgcggtaatgataaataaaagcaataaccggccgtttgtgacgagtttgacctgctcggaaaatgcggttttcgtccctttgcgcaaatgcgacggaacgaggagcgcgtttgtgaggaatgcgatgattcctaccgccacaatgacggcaaatgcgattctccatccgaattgctggccgagataggtgccgaacggaacgccggtcaccgtagccaccgtcagccccgtaaacatgatagaaatcgcgcttgctcttttatgctccggcacgatattggcggcgattgttgccccgattgacatgaaaatgccgtgggaaaaagccgaaatgacccgtgccgccagtaagacgccgattgaggaagcgctcgctgcgagtgtatttccggcgataaaaattaacatcacccagagcagcagcgttttccgcgacatgccggatgtgagagacgttaaaaccggcgcgccgaatgtcacgcccagagcatacatggaaacggtaagtcccgccgttgtcacaggtatatgcagatcttgagatataagcggcagcagcccgacgctgataaattcggttgtgccgatcgcaaaagcgctgacggctaatgccagcagcgctggtaaatagctttggcgatgtgaagacatctgttttcctccttgaacgataatgtatggttgaaatgatgccgggtaaacgatataagtataagagtacattccttttcagccggcaaatgtcattatgatcgatagaagtgtcattgaaaagaacgtacttttaagtgccataggcactttttagttcctatagatgaggaggaattaccgttgctgaagaaaaaatacaatatatccgtagaagcggcgcttgaagtgatcggcggaaaatggaagtgtgtgatcctctgccacctcatgcgcgggaaaaaacgcacaagcgaattgaagcggcttatgccggacatcacccagaagatgctgacacagcaattgcgggagctggaagctgacggcgtcatcaaccggatcgtgtacaatcaggtgccgccgaaagtggaatacgagctgagtgaatacgggcacagtctggaaagaattttaaacgcgctgtgcgactggggcgcgatgcatattgctaaacggtacggcgaggtgtcttccgttttagaggacagcattttaaatgacaaatttaaagaaccgggacaaatataagaaaaaagcaggcagcctgagacgctgatcctgctttttttatggaagaaagatcattttatatgcaaaaaaaccgattgaacaacatattgatcggtataagggtggatttttatcaagttgtactggcggatttcttttaatgtgttatactatatataaataaaggtaaattagagtggcatattaaaaaggggtgacctgagcatgaaggtaaaagtagcaatcaacgggtttggaagaatcggaagaatggtgttcagaaaagcaatggaagatgatcaaattcaaataacagccattaatgcaagctatcccccggaaacgcttgctcatttgataaagtatgacacaattcacggcaaatacgatcaagaagttgagacctccgacgacagcctgatcgtcaacggaaaacatattatgctgttcaatcgccgggacccgagagagcttccgtggaaagaatgcggaatagacatcgtcgtagaggcaacggggaaatttaattcaaaagaaaaagcgatgagccatattgaagcaggggcgaaaaaagtcattttaacggctccgggcaaaaatgaagacgttaccattgtcatgggagtaaatgaagagcagttcaatcccgatgaacatgtcattatttcaaatgcatcctgcacgacaaactgtcttgcgccggtcgtcaaagtgcttgatcaggaattcgggattgaaagcggcctgatgacgactgttcacgcttacacgaatgatcaaaaaaatatcgacaatccgcataaagatctgcggagggcgagagcgtgcggagaatccatcattccgacttctacaggcgccgccaaagcgctgtcgctcgtgctgcctcatttgaaaggaaaacttcacggtctcgctttgcgtgttcccgttccgaatgtgtcattagtggaccttgtctgcgatctgaaaacagatgtgtcggccgagcaagtaaacgccgctttccaaagagccgcaaaaacgtcgatgtacggaattcttgattattcggatgagccgctcgtttcttcggattataatacgaattcacactctgcgatcatcgacggactgacaacaatggtgatggaagaccgaaaagtaaaggtgctcgcctggtatgacaatgaatggggatattcctgccgggtcgttgatcttatccgtcacgtcgccgcgcgaatgaaacacccgtcagctgtgtagactaaagatcatggacatttgttagaaaaaaacccttaacggcatattcgcaaaaaacacaccttgcaaaataaacttaaacacagtatactatctttcgtgaacttcttgctcgtgactgcttcggaattacttaaagggttaggacctctccggactaactttcccccgtggtaaatggccgggtcagttctcggaaattcacttttttaattcttgttaaggggggtccatgattatggaaacaatggggcgtcacgtcatctccgagctgtggggatgcgattttgataagctcaatgacatggattttattgaaaaaacgtttgtaaatgctgctttgaaatcaggagctgaagtgcgcgaggtcgcatttcacaaatttgcaccgcaaggcgtaagcggagtcgttattatctctgagtcacatttaacgattcacagttttcctgaacacggatatgcaagcattgatgtttatacttgtggagacctggatcctaatgtggctgcggattacattgcggacgcattacatgcagatacaagagaaaacattgaaataccgagaggaatggggcctgtacagattaaacaggcacaagcgaaagtactgtaattttcaaaacgcaaacacaagggagctaagctgaaaaagccattacgcgctttgaagctgatgctccttttctaatgtaaaaaaacagcattgctttttctttaagcattttttttgtaaaatagaaaggataaggccggtctatcggctctcccaacaaataggctcatcctagaaacgttggcgggcatttaccggaagcttgcgaaccgcattacagcaacgaaacagatgggagctgatccaatttgaaatgtccttcatgccagcacaacggttcccgcgtacttgattcacggcctgcggacgaagggaaatcaatccgcagaaggcgggaatgcgaagcctgccattaccgcttcactacatttgagaagtttgaagagatgcctctgatcgtcgtgaaaaaagaaggcgtccgggaagaattcagccgtgaaaaaatgctgcgcgggttaattaaagcttgtgaaaaaaggcccgttcctttaaaaacattggaagacatgtgctttgacattgaaaaagagctgagaaaccaaggtgtatctgaagtcaaaagcgaacttgtcggagaaatggtaatggaccgtctggcgaaaatcgatgaggtgtcttatgtccgctttgcctccgtctaccggcagtttaaggatataaacgtgtttatcgatgaattgaaagatttaataaagaaagaacgctgagagagctaagagattgtgtctggctcttttctcatgagcaaaattggcatttgatagatcgcagaaacggtgtaaaatgagagtagaaacatatcggaaggtttgagaatcatggctgactattggaatgacgtattgcctgtagatccttatacggtcaaaagccgttcgcttcttcaggatgtcgacagacaggttttgacacatctgtaccagccgctgatcggttcttttgcattctccctttatatgaccttatggggggagcttgagcagaaccgcttgtggggagcggaatccacgcacaggcagctgatgggcatgatgcagtcaaatttaaaaaagattcatcatgaacagggaaagcttgaaggaatcgggctgctgaaagtgtatatccgggagtccgagcaaaaagagcggatgtttatttatgagctgctgcccccgctcagaccgaatgatttttttgaagacggcatgctgaatgtctttctttataacagagtcggtaaaacgaaataccagcagctgagacaattttacacgcacccttccgtcggcgcggacgcaagggaaattacccgtccgtttaatcacgcctttgcctcttttcagccgagtgaatggaaaatgacgcctgatatggaagaggcgatgaagctccccgaggactatgagacagcgtctgtcggacaagcgccttcctatacggtgacggaggaagtatttgattttgagcttttcatggcgggactgtcagaaacgatgataccgcgtaaatcaatcacgcaggacgtgcgggagagcattaaaaagctttcatatttatacggaatagatcctatctccatgcagcacgtcgtcatgaccgcaattaatgaacaggatacgataacggccgaagcgctgaggaaagcggccagcgactggtaccaaattgaaagaagcggtaagcttccggaactgattgataaaacacagcctgtcaccttgagagaaaaccggacggaaaaggacgattcattgaacggcgaactcatcgcacagcttgagaccatatcaccgagaaagcttcttcaggacattgcggacgggaccgagccgtcaaaagccgacttgcagattatcgccgatattatgttcgaacaaaagcttgagcccggcgtcaccaatgtgctgatttattatgtcatgctgaaaacggatatgaagctgtccaaaaactatatccaaaaaatcgccgcccactgggccagaaagaaagtcaaaacggtacgggaagcaatgaagctcgcaatagaagagcacaggcaatatcttgattgggcggacggcaaaacaaacggcgcggcgcgcggcaaaaaaaccgtccgggaagaaaagcgccctgattggatgaaagaagaagaaaccgggaagaaacaagaacagccggctctttccgcgcaggatcttgaagaacagaagaaaaaaatgatggaagaaatgaaaaaactgaaaaaatactctgcctattgagacagagaagcggggtgatattgaatggaaccgatcagccgatccttagaaggcgtgacgaaaagacctgactttcaaaaacgcctggaacgaatgcagcagcaagtcatggccgacgaagacgtccaggcttttttgaaggaacagaaagatgtaatcaatcaaagcatgattgacagagggttaaataaactgtacgaattcgttcagcaaagcaaacagtgcgccttctgttcgaaagacagccggacgaacagcctgcttgaaggctatcatccgaagcttgtgatcaacgggcgttccatcgatattgaatattacgaatgtccggaaaagagaaagctcgaccgccagaaaaggcaaaagtccctgatgaagagcatgtatatccagcaggatcttctcggcgcgacctttcagcagatcgacattaccgatccgagcagagtcggcattttccagcatgtgacggattttctgaagagctataatgaaacgggaaaaggcaaagggctgtatctgtacggaaaattcggaatcggaaagacatttattttagccgccattgctaacgaactggcggaaaaagagtattcatcaatgatcgtatatgttcccgaatttgtcagagagctgaaaaactcgctccaggatcagtcgttggaggcgaaactgaatatggtgaaaacgacgcccgtattgatgcttgatgacatcggagcggagtcaatgacaagctgggtcagagatgaggtcatcggcaccgtgcttcagcacagaatgagccagcagcttcccactttcttctcgtctaatttctcacctgacgagctgaagcatcattttacgtattcacagcggggagaaaaggaagaagtaaaagcggcaagactgatggagcggattttatatttggcttcgcccgtccgtcttgacggggaaaaccgccgccgttcatgatgccggcgtccaatgggaaggatttgaagggaatgaggaataagaaggctgtcacttgggctgcggctgcggcgggagcgggccttttgctgtgggcaaaccgcaaatatctgaatctgtcgcctaaggagatccggctgtgggtattatcgttcggtgtttttgcgccgcttgtgtttatcggaatttccatcgtcaggccttttgtgctgtttcccgtatcaatcgtttccgtcgccggaggattggcgttcggcccgtttttcggcaccatgtatacgctggcgggctcaatgggcgctgccgccgcgtctttttttgcggcggggctgtttgcctttaatgagaaaagccgtcatggaaaaatggaagccattcaaaaacagatgaaaaccaatggcttcttttatatttttatcctgcgtattctgcctgttaactttgatgtgatcagctatgccgcgggcctatcgaaagtcaggccgatgacgtattttttggcgaccgcagcgggcatcattccggggacgatcgtcttgaatgtgctcggcgcgagctttatgtccggaaatgtgctgaccgtactcggcgtgatctgtctttacatcgtatttttatcgcttcccgttatatttaaaaagaaggtgcgccatttgttcggcggtgaaagctaacctttacgtctattttaaaaacatcccccatatacttgtaacagatgccgtaaggggggacaaatatgcttgaagtgatctttgaagatgaccacgataccgccgcttttttacatctcattcagcaatcggacgaccggagacattttattgtccgtgaaggcataaaaaaagtcggaatcgcaaggtctgaaacggctttttgcgttcagcgctttattgagccgatacttgtcaggttttttttggaatgcaaagaagacgagcatatgctttcgcttattgaggatgcatactgcttcaccgatcaggatgaacagcagcaaatccttcagcttgcacacagcattatggaaggagagcttgatgatcatccgttcgagccgaagaaagagccgcgcacacagtttatttcagatgcgctccggacgatttcacttgatgcgggtgttttttccgtgcgttcgtttcagacgttccggctcggcaggtattatgagcggctcagagaatacgcggaggctgcgatagatgaataccggatggaacaggaatatcaaaactttatccagtctctgagagattatgtgacatccaatccgccgcggatgaagaaagtccgcatcgtacatgaccgggcttttacgctgtgggagctgcgctatttgtcagaacgggaacagaaaaaatacatagacagacggtttgtgcgggagcacccgatgtatatagattcccatctccttgcgccgctgatctccattgcgcctgagacggtagaactgtatacggacaaaccggagcatatgatgtccagaacgattcaaaacgtgtttcaggagagggtgcgcctttttccgctgggcgcatttgcagccgagaagacggaaggatagccgcacggacggccttgtgtaagcggcaaggctgtctttgcgaaatcagacggaaaaccgagttgcatttttctcacagacattttataatacataaaagattaatgattgctacacgtattgataaggacatgaagcattgataccggctttataagagaggagagcccaggctgaaagctttccagctatggatcattgtctttaccgcctttgaacttcagctgtgaacgccggaagaagcgccagtaatagctgacgggaactcccgttacagagtttagagccgcaggtgccgaaacaatcggccgcgcggaaaaaagggtggaaccacgattccgtttatttaacctcgtccctttcatagggggcggggtttttgatttgcataaaaaaaggagtgacgaagatgtcagatatgatcaacatcacatttccggacggagcggtaaaggaatttccgaaaggaacaacaacagaagatatcgcggcatccatcagtccgggattaaagaaaaagtctttagccggaaaactgaacggacaggaaattgatttaagaacgccgattcaagaggatggtgccgtagaaatcattacagaaggcacagaagaaggcttgaacatcatgcggcacagcacggcgcatttattggcccaggcgattaaacgcatttataaagatgtgaaattcggagtcggccccgtcattgaaaacgggttctattatgacgttgaaatggagcaggcgctgacgccggatgaccttccgaagattgaaaaagaaatgaaacgcatcgtcggtgaaaatctgccgattatccgaaaagaagtgagccgtgatgaagcaaaagccatgtttgcggaaatcggcgataatctgaagcttgaactgctggatgccatccctgaagacgaaacggtctccatttatgagcagggcgaattttttgacctgtgccgcggcgtgcacgtgccgtctacaggcaaaattaaagaatttaagctgctgagccttgcgggcgcatactggcgcggcgacagcaaaaaccaaatgcttcagcgcatttacggcacggccttctttaaaaaggatgacctgaaagagcatttgcggatgcttgaagaagcgaaagaacgtgaccaccgaaaactgggcaaagaattaaaattgttcgccaactctcaaaaagtcggacaaggcctgccgctctggctgccgaaaggcgcaaccatccgccgcgtgatcgagcgctacattgtggataaagagctgagcctcggttatgagcacgtctatacgcctgttctcggaagcaaagacctgtacgaaacatcagggcactgggatcattatcaggatacgatgttcccgccgatggaaatggacaatgaaacactcgtgctccgtccgatgaactgtcctcaccatatgatgatttacaaacaggacattcacagctaccgcgagcttccgatccgcatcgcagagctgggaacgatgcatcgttatgaaatgtccggggcgctttcaggtcttcagcgcgtacgcggcatgacgttaaatgacgcgcacattttcgtccgccctgaccagattaaagaagaattcatccgcacggtccgtttgattcaagacgtatacgaagacttcggcctgagtgattacacattccgcctgtcttaccgcgatcctgaagatacggaaaaatattttgatgatgatgagatgtggaacaaagcgcaatccatgctgaaggcggcaatggacgaaatcggccatgactactatgaagcggaaggcgaagcggcgttttacggccctaagcttgacgtacaggtgaaaacggcgatcggcaaagaagagacattgtcaactgtacagcttgacttccttcttccggaacgctttgatctcacttacgtcggagaagacggcaaacagcaccgccctgtcgttattcaccgcggtgtcgtgtcaacgatggagcgtttcgttgctttcttaatcgaagagcacaaaggcgcccttccgacatggcttgcgccggtgcagttccaagtcattcctgtatcaccgtccgtgcatcttgactatgcgaaaaaagtgcaggagcgcctgcagcgtgaaggcctgcgtgtcgagcttgacagccgggacgagaaaatcggctataaaatccgtgaagcgcaaatgcaaaaaatcccgtacatgcttgtggtcggtgaccaagaagcggaaaacggcgcggtaaacgtccggaaatacggcgagcagaaatcagaaaccgtctcattggacgattttgtgaaaaaggctgtagccgaagcgaaaaaataaccggaaatacaaaaaaccccgttcattcagaatggggttttttttgcgtataaaattatctttctttttgtttctctataatcgcaaacagctcgtgaagatcgctgatcacgtaatcaggcgcaatgtccgtatcatttttcttttgcgtccggtttacccagactgtcgtaatgcctgcccgtttcgctcccaatatatcagtattgaggttatctccgaccataatggcgtcttcttttttcaggttcaggaggccgaggcaatgttcgaatatggaggcgtcgggtttcccttttccgaaagcgcctgagatgacgatttcattaaaataaggcgcaagctcaggaacgccggcgagtttttctttctgcaggctgggatcgccgtttgtcagcagaagcaattcataaacacctttcagcttatcaagcaccgcaaacgtttcatcatacacgtacggacgctgtctgcgttccgccgcgaaaaactccgccaaatattcgccgtaagccgcatcgtctataccgacgctttttaagccgttcgtccaggcgtttcgtctgtattccggcgcaatccgattcagctgtttaaatccttcgctgaccggctcggaaaaattcgcccacaatccttcaaacggattaatgccgatcatgaccgtataaggataggtttcgtatgacatatacaattcccgtgccgccttccgaaccgcatcttcaaatgtatgcgggtcaaggccatattttttttccgcttgtaaacatgtttccctgaatgttgttctgacgcttttttcatcccataacagtgtatcgtccaaatcaaaaaatacggctttcatgatcttctcctctttgttatattctgaaactctctgccgcaaggctcccgtttattctacaatagatatatagactgtgaaagatttgttttcagatgatttgaaaaaaacaggcaggtttgtgtcagattctgtctcaggctctaaaacgtgataaaattaaatttgaaagaacaggtgaaaagtatgctgcatttgatcatcatgatgctggaaagagtcggaattatcgtcatattgggatttgttctggctcataccagattgttcagacaggcgctccagcagcctgagagctataaaggcaaagcggtgctgatttcaattttctcgctgttcagtatcatcagcaactatacgggaatagaaattcagcggaatacaatcatgaataatgactgggtgtttcaaattaatccgtccggttcaattgccaatacaagaattatgggcgttgaaatcggcggactcttaggcggcccgtatgtggggatcggcgtcggcatactggccggcctgcatcgtttatcactcggcggcgcgaccgcagtcagctgtgccgtctcatccgttttagcgggcattttgtccggctggatcggacggtatttcagaaaacgctatgcgatgccgacaccgcgggtggccgcgcttgtcggactcggaatggaatcgctgcaaatgctgctcatcctcttgatggccaagccgttttctgatgcttggacgcttgtgagcatcatcggcatcccgatgatattggtaaacgggtcagggacttttatttttctttcgatcattcagtcgattatccggaaggaagaacgggcgagagcccttgaaacccatagggtgctgatgattgccgatcagacgcttccgtttttccgccaggggctgaatgaaagctcatgcaaaagcgtcgccgccatcattcacaggcaaacaggaacggacgcggtatcgcttacggataacgaaaagattttggcgcacgtcggcgcgggtgccgaccatcatattccgtctgaaagcctgatcaccggattgtcaaaacgcgtcattaaaacgggtcatattatgaaagcgacatcaaaggaagaaattgaatgcacgcacgatccctgtccgctgcatgcggcgatcgtattgccgctgacgtcaaacggcaaaacgatcgggacgctgaaaatgtactttaaaagcccgtcaggtttaagccgggttgaagaagagcttgcagaaggactcgccatgctgttttccacccagcttgaactcggcgaggcggaactgcagagcaaattgctgaaagacgcagaaataaaggcgcttcaggcacaggtcaatccgcattttctgtttaatgcgatcaatacgatttctgctctttgccgtacggatgtggaaaaaacccgaaagcttctgctgcagctcagcgtctatttccgttccaatctgcagggggcaaggcagctgctcatcccgctttctaaagaactgaaccatctgcaggcgtatttatcattggagcaggcccgttttcccgggaaatataaaatcagtcttgaaatcgaacgcggtttggaggacatcgaaattcctccttttgtgctgcagattctcgtcgaaaatgcgctccgccatgcattttcaagaaagcaggacagctgtgccgtcaatgtcagcgtggtatcctccggtcagtcggttttaatgcgggttggagataacgggcggggaattgatccggaattgctgtccgtgctcggaaaccatccgctgccgtctaaagaagggacgggaaccgcgctttacaatttaaatcagcggctgatcgggctgttcggccccaaagcagccctgcgattggaaagtgaggccggcaaaggtacggacgtatcatttgagctgcctttgaaactgatgactaaaggagaagaacatgctgaaggtgttaatcgttgatgatgaaatgctggcaagagatgaattagcttatttgctgaaacggacgaatgaagtaagtgacataaacgaagctgaaaatattgaatccgcttttgacagtatgatggatcaaaaaccggatctgctgtttttggacgttgatttgtcaggagaaaacggatttgacattgccaaacggctgaaaaacatgaaaaatccgccggccgtcgtttttgcgacggcgtatgaccaatttgctttaaaagcctttgaagtcgacgcgctcgattatttaacgaagccttttgatgaagaaagagtgcgccagacgatcagaaagtttaaaagagtgaagcgggacagggcaggagccgtctcagagcagccgtccgcagccggagcgcataaactggctgtatcagccggtgaatctattgtcattttagatacgaaggacattattttcgccggcatggaggacggacacgtttccgttaaaacgtttgccgcgtcttattccgttcacgaaactttggcggtcattgagaaaaaactgcctgatacgggtttcttgagagtgcaccgcgcgttcatcgtgaatacggagcatattacagaaattcatccgtggtttaattcgacgtacaatcttatcttaaaagacggctctaaaattcccgtcagccgtacatacgccaaggacttaaaaaagctgcttcatattatatgaggcggcttttgcatttcagcagccgttttttgcatttcagaatgaatattcagccgtttgttatgaaagcgctttaaaaggcgatttctcttttataatggacctaacaaagagaaagaggtgaagaaaatgagtgcgaaaaaagtgtacggatttctgacacaagcatttatttttgccgtaattatgctcatatctaatgggattgcagcgattgtccccattcctatacccgcttccgtagtaggtttggtgttattatttgtcctcttatgcctgaaagtgattaagcttgaacaagtagaaacgctgggaacatcattaacgtcactgatcggatttttatttgtcccgtcgggcatctccgtgatgaattcacttggcgtcatgcagcagtacggcgtgcagatcgcactcgtcattttactcgccaccatcattctgttaggggcgacgggccttttttctcagctgatcttgtctgtcagccaaaaacgtcagaaggcagcccctgaaaaacaaacggtgcgccgttccaatcaggaaaaagaacttgtgcagcattaggagggaaatcggatgagtccatatttcggtattgtcgtttcacttgcggcctttggcatcggcacgtatttatttaaaaaaacgagaggctttttcctcttcaccccgctgtttgtcgcgatggtgcttggaatcctttttctgaagctcggcggtttttcatatgaagattataaaagcgggggagacattattaaattcttcctggagcccgcgacgatcgcttttgccatccctttatacaaacagcgtgacaaactgaaaaaatactggtggcagatcatgtcttctatcattgtcggctctatctgctcagtcacgattgtctatttgatcgcaaaaggcattcatcttgacgcggccgttatgaaaagcatgcttccgcaggcggcgacaacggcaattgcccttccgctgtcaaaaggaatcggcggcatcaccgacatcaccgctttcgccgttattttcaacgccgttatcgtctatgctctgggcgctctattcttaaaactctttaaagtgaaacacccgatctctaagggactggctctcggcacatccggacacgcactcggtgttgcggtcggtattgagatgggagaagtagaagcggcaatggcaagtatcgcggttgtcgtcgtaggagtggtgacggtgctggtcattccggtattcgttcagctcatcggaggataaacccgggtcatagacccgggtttttttattgtgttggcacgtccgcgggcggcaaagaatgaaatttcacatttttccttgcgctcgacccggcatcgtgttaaaatgaaaaagttgatccggagaagtcattcttgactaatgatccggtattgtgtagaatagttattgaattgaatataaatcacaagcagaggcacccgcttctcacctgattgacacattcatgtagttggcaggttgaccgtacatttttatttatgcagatgttcgtagtgtgggtgtgttgtcatgcccgcactttttgtttgcctgcagaatgcagtcaacaagcgttgtgaatcaattcgaagaaactatggaggtggctcattattagcaaagatcaattggttaatgagggtatccgtgcacgtgaagttcgtctgatcggacaaaatggcgatcagctcggcatcaagtcccgtcaggaagcacttgaaatcgccggccgcgcaaatcttgaccttgtgttagttgcagcaaatgcaaaaccgcctgtctgccgcatcatggactacggtaagttcagattcgagcagcagaaaaaggacaaagaagcacgcaaaaatcaaaaaatcattaacttaaaagaagttagattaagtccgacgatcgatgagcatgactttaacacgaaattgcgcaatgcgattaaattccttgaaaaaggcgataaagtgaaagcttctatccgctttaaagggcgcgcaatcactcataaagaaatcggccagcgcgtattggaccgtttctctgaagcatgtgcggaagttgcgacagtcgaaacaaaaccaaaaatggacggccgcagcatgttcttaatgcttgcgccgaaaaacgaaaagcaataaggaggaaatcccatgccaaaaatgaaaactcaccgcggatctgctaaacgttttaaaaagacaggttctgggaagttaaaacgttctcatgcatatacaagtcacttattcgccaacaaatcccaaaagcaaaagcgtaagcttcgcaagggtgctattgtgagcgcaggagacttcaaacgcatcaaacaacagcttgccaacatcaagtaatcggacaaggaacaattaggagggaaatataatgccaagagtaaaaggcggaactgtgtcgcgtcagcgtcgtaaaaaggttcttaaattagcaaaaggttatttcggttcaaaacatagattatacaaagtagcaaaccagcaggtcatgaaatcaggaaactatgcattccgtgaccgccgtcagaaaaaacgtgatttccgtaagctttggatcactcgtatcaacgctgctgcacgtatgaacggtctttcttacagccgtttaatgcacggtcttaagctttcaggcatcgaagtaaaccgcaaaatgcttgctgatcttgctgtaaacgatcttactgctttcaatcagcttgctgatgctgctaaagctcagttagacaagtaagttgaaaaagccgctctctttccgggagcggtttttttacgtaaagggtgacaatcaatggctctcctcatttacgccgtgttgataaacggatacggcttttggatcatgggcgctgataaaagaagagcaaaggcgcacaggtggagaatatcagagaaacggatatggctcacagccgccatgttcggctcactcggcgtatggatcggcatgcgcaccttcaggcataagacgaaacacaaatcctttttatacggggtgccgctgctttttctcactgaagccgcccttgtgctgatgtatttggtgtataaagaataaaaagcaggagagcttatcgctcgcctgcttttttcgcttttttgatgggctggtcccaatcaatcttgcaattcgggtaccgctccaatacctttttttcgacttcttcaaaatcacctgcagaaaagcggttcagcttttccggattttcggtccatacaaatatcgtatgaataaacagcggatgatctttggaagggatatgcttttctccttcaaagagcactcctttataagtaagctggagattttttcgcgtgtttttctgttcgtcaataaaataaaaattctcttttgattgcgccagtctgagccttcttttcgggtttgcgtagaatttgacgcccatgtaaataaaataaataagaagtgcaagcaagacaatcctcaatactgtaatggccatatgtgtgaaggcacctcctcacctttgtcatgatctgatgtaatacgaaaaacaaaacaaaaggtttcatttttttaaaagaaatagataaaaacatttacccgtttttcaggcgaattaatcgtatgcttcagcattggttttgtataataagaagggtagtgaaaaaaaggaggtttattgatgacaaaattagatgaaacgctcaccatgctgaaagcgttaacggatgcaaaagggataccgggaaatgagagagaagtaagacaagtgatgaaatcatacatagaaccatttgctgatgatgtcacaacagaccggctgggaagcttaatcgccaaaaaaaccggcaaagaaaacggtccgaaaatcatgatctcagggcatttagacgaagtcggttttatggtgacgcaaatcactgataaaggctttctccgctttcaaaccgtcggcggctggtggtctcaggtcatgctggcccagcgcgttaccgtcgtgacaaaaaaaggggacatcacggggatcatcggttcgaaaccgcctcacattctgcctcctgacgccagaaaaaaagccgccgatattaaagagatgttcatcgatatcggggcgtccagccgtgaagaagcaatggaatggggcgttcttccgggtgaccagattgtgccgtattttgaatttacagtgatgaacaatgaaaagcatttattggcaaaagcatgggacaaccgtatcggctgcgcgattgccatcgatgtattaaaaaatctgaaaaacagcgatcatccgaatgaagtatacggggtcggaacggttcaggaagaagtcgggcttcgcggggcgaaaacagcggcacatacgattcagcctgatatcgcgttcggtgtggatgtcggaattgccggagatacaccgggaatttctgaaaaagaggcacaaagcaaaatcggcgaagggccgcaaattattctgtatgacgcgtcaatggtatctcacaaagggctgcgcgaccttgtcgtgaacacggcggaagaagcgggaattccttatcaattcgattccattgccggagggggcacggattcaggttccattcatttaaccgcaaacggagtgccggcgctgtccattacgatcgcgacgcgctacattcacactcatgccgctattttgcatcgggatgattatgagaatacggtaaaattgatcacagaagtgattaaaaaattagaccgggaaacggttgaccgtattacttatcaataaagatacggaagaatctgcttttttaagcagattcttttttttttgtctgtacaaatatgaaccctgcgtctacaataagagaagacatagaaaaatctgacaacatgtttttgaaagcgctttaaaaaagggagggtttacaaatgaaaaacagattcagacgcatgatccgcttttcatgcgcagccgttacagccggtctgctgctgatgtcttcatctccggcatctgccgcgttttggggggcatcaaatgaattgctgcacgatccgacaatggcgaaggaaggaaacacgtggtacgctttcggaaccggtttggaaggggagagggggcttcgcgtcttaaaggcgggcagcggcggcgtatggaccgttcagaaatcaatctttacttccccgctgtcatggtggggcaattatgtgccgaattacgggctgaatcaatgggcccccgatgttcaatattttaacggaaagtattggctgtattatgccgtttcttcattcggcaaaaatacctccgcgatcggtcttgcatcatctacaagcctcagttcgggaaactggaaggacgaagggctcgtcatccgttcaacaagcgccgataactacaatgcaattgatccggagctgacaattgataaagacggaaacccttggcttgccttcggttctttttggagcggcattaagctgacaaagcttgataaaaatacaatgaaaccgacgggatcactttattccatcgctgccagaccgaataacggcggagctttggaagcgccggccatcacctatcagaacggctactattacttaatggtgtcgtttgataaatgctgttcaggcgtgaatagtacgtacaaaatcgcttatggaagatccaaaagcatcaccggcccatatctcgataaaagcgggaaaagcatgtcagaaggcggaggaacgattcttgactccggcaatgaccgctggaaaggcccgggcggccaagacattgtgaacgggaatattttagtgcgtcatgcgtatgatgccgaaaacagcggaattccgaagatgctcatcaatgatattgattggagttcaggctggccttcctattaattgatcagccgggcatgtgtgtccggcttttttacttgcaataaaagattgacagtttgattcctccttaactataataaaattgttcgtacaaataaaaggataaaagttttatattttatattcgtacgtatatttttaaaaatgcaagcgctttattttgatgggaaggggaaatgaatgtgcttcagaacaaagaatatgaattttggtttgtaacgggaagccagcacttatacggagaggaaacgctgcagcttgtcgataaacacgcaaaggggatatgtgacggcctcagcggggtgtcatcaagatacaagatcaggcataaaccggttgtcacgtcatctgaaacgatcagagaggttttgcgggaagcgcagtatcaagaaaactgtgccggggtcgtgacgtggatgcatacattttcccctgcgaaaatgtggattgaaggtctttccgcttttcaaaagccgatgcttcatctgcatacccaatatcatcgcgacatcccgtgggaaacgattgatatggactttatgaacagcaaccaatccgctcacggagaccgggaatacgggtatatccagtcaagaatggggcagacgagaaaagtcatcgcaggctattgggatgatgaggaagtcaaacatgacatttcgcaatggatgaacactgctgccgcctggaatgaaagcaggaatattaaagtagcccggttcggcgacaatatgcggaatgtagcggttactgacggagacaaagtcggcgcccacatccaattcggctggcaggttgacgggtacggaatcggcgatcttaccgaggtgatgaacaacgtcaccgacgcagaaattgaggcgctttatgaggaatacgacaaattgtatgtcatcagcggcgaaacaaaacaagatgaagcaaaagttgcttccattaaagaacaggcgaaaattgaactcggattaacggcctttctcgaacggggcggatatacagcgttttcgacctcctttgaagttttgcacggaatgaagcagcttccgggacttgccgttcagcgtctcatggaaaaagggtacggatttgccggcgaaggcgattggaaaacggctgcccttgtgcgaatgatgaaaataatggcggacggagaacaaacctccttcatggaagattatacgtaccattttgaaccggggcgtgcgatgattctcggatcacatatgcttgaagtatgtccgacgatcgcccttgatcagccgaaaatcgaagtccatcctctctcaatcggagggaaggaagatccggcccggttggtctttaacggaatcggcggttcagccatcatcgccagcatcattgatatcggcgggcgattccgtctcattctgaatgaagcagaaggtagggaaattgatcatgatatgccgaatctccctgtggcgcgggtgctatggaagccggagccatcgctgaaaacagctgcggaagcatggattttggcgggaggcgcccatcatacttgtatgtctttccggcttacggctgaacagatgcttgactgggctgagatggcaggcattgaaagcatctttatttcccgcaataccgaaatacatgagctgaaaaaagagctgaaatggaatgacgtattataccggttgggagggaattgatatggcgtatacgattggtgttgatttcggcacattgtccggccgggcggtgcttgtcaatgtccgcacgggcgaagagatcgcgtctgcggtaaaagaatacactcatgccgtcatcgaccgcacgctgccgaagacgggtgaaaaactccctcgggactgggcgcttcagcatcctgccgattatatcgaagttctggaaacggcgattccgaacctgcttcaagaggcgggcgctgatccaaaagacgtgatcggcataggaattgattttaccgcctgcacgattttgccgatagacgtcgcggggcagccgctttgtatgctgccggaatttgaacgggagccccacagttatgtgaagctgtggaagcatcatgcggctcaaaaacatgcagaccgtttgaacacgattgccgaagacacaaaagaaacattccttaaaagatacggcggtaaaatttcttctgaatggatgatcccgaaaatcatgcaaatcgcggaagaagcgccgcatatatacaaggcggcagatcggattgtggaagcggcagactggatcgtctatcaattgtgcggttcattgaagcgaagcaactgcacggccggctacaaagcaatctggaatgaggagacggggtatccgccggatcatttttttgaaaagctcaacccgttaatgaaaacgattacaaaagataaattaagcggcaccatttattcagtcggggaaaaggcaggaggtttgaccgaaaaaatggcggagctgaccgggcttctgccggggacggccgttgccgtcgccaatgtcgacgcccacgtgtcagtgcccgcggtcggtattacagagccggggaaaatgctgatgattatgggaacgtctacctgccatgtgctgctcggcgaagaagaacatatcgtccccggtatgtgcggggtcgtcaataacggcatcttgcccggatatgcgggatatgaagcgggacagtcctgtgtcggcgaccactttgaatggttcgtcaaaacgtgcgttccgagagactatgagaaggaagctgaggataaacacatagacattcacgagctgctcagcaaaaaagcagctgtacttgttccgggggaaagcggccttctcgcgcttgactggtggaacggaaaccggtcaaccttggtggacgccgatttgacgggcatgatgctcggcatgacgctgcacacgaagccggaagaaatctacagggcattgattgaagcgacggcgttcggaacgaggatgattatcgaaacgtttcgggaaaacggcgttccggtcgaggagctttacgcagccggaggaatcgccgaaaaaaatccgtttgtcatgcagatttatgcagacgtcacaaatatggatattaaattatccggttctccgcaggcgcctgcactgggctccgcgattttcggagcgctcgccgcgggacgggaaaacgggggattctccaatattgctgaagcatgtgcgcatatggggaaattaaaagacggcttttatgccccgaaccgggaaagagctgagatttatgacagcttatatgcggaatataaagagctcgttcactacttcggcaaagaaaacaatgtcatgaaacgcctgaaagccattaaaaaccgtgattttgcgaaaggggggagccgccatgcttgaagcgttaaaagaagaagtgctcgccgccaatctgaagcttgaggaacataaccttgtcacgtttacatgggggaatgtcagcggcattgacagagagagcgggagaatcgtcattaaaccgagcggtgtcgattacagtgagctgaccgctgacaaactggtcgtcctgaatgaggacggagacattctcgaaggctcgctgaaaccgtcttctgacacgccgacccatctttatctgtataaagcgtttccggctatcggcggaatcgttcatacgcactcccgctgggcgacgagctgggcgcagtccggaagagacatacccgctctcggaacgactcacgcggattactttgaaagcgctataccctgcacgagggaaatgtatgaagaagaaattgtgaaagattacgaatatcatacaggcaaagtcatagccgaaacttttcaaaacgaaccgtatgaacaaaatccgggtgtcctcgtccacagccacggcccgttctgctggggaacggacgcgctgaatgccctgcataacgccgttgtgctcgaaacggtagcggaaatggcctaccattcgcttatgctgaacaaacagctcagtccgatcgacagagtgctgcatgataagcatttttacagaaaacacggggcgaatgcttattatggccaaacttgacgcagccgggtttctgattgatttagacggaaccgtattcagggggcgggagctgattgacggcgcaaaagaagccgttcatacccttcagtcactgggcaaagccgttgtctttttaagcaaccgcggcaatctatcaagagcaatgtgccgaaagaaactgctgggtgccggtatccgcacggatgaacggagcatcgtgctgtcctccagtgtgacggcatcatttttaaagaagcattatcctttgtcaaaggtgtgggtgttaggagagaaagggctgactgatgaactcgctttagcgggtgtcgccctggcgcaaaacccgcaggcggcagactggcttgtcatctccctgcatgaaaccgtcacctatgaggatttgaatctcgcttttaaggcggcttcctccagcgcgcgcatcatcgccacgaaccgggaccgctcctttccgaatgaaggcggccatgccatggatgtcgcgggaatgatcggggccattgaagcatccgccggagcaaaaacggagcttgtcatcggcaaaccgtcttggctgatggctgaggcggcatgtgaagcgctcggacttccccctgaggaatgcgccattatcggagacagcctcgaatctgatattgcaatgggcagcctgtacgggatgaaaagcgtattggttctgacggggtcggccaaacttggggagccccgtctatatgaacctgacatcgtccttgattctattaaagacctgacagaattagcgaaggagggaatccttttatgaaacgttctcctgaggacattcaatccgagtttgacaaggaaggggccagccgctcaccgattcaaatagaagatatcgtgatcggggcgaatgcaaaagaagagcttctcagatttctgcaaaaaaaatgctggaatcatccggtcatcgtctgtgaccggaacacgtacgaggcggcggggcgtctgcttgcggacgaattgagggcaggcgggatcaaagcgtcaaaagtcatcattccggagcatgaagccggggccgccgcggctgatgagaggacattggtctatacgctgatcaatctcgcggaagagacggatgtcatcattgcggccggttcaggaacgattcacgacattacgcggtttgccgcctgccagcgcggattgccgtttatctcattccccaccgctccgtcagtcgacggttttacgtcggcgggagcgccgctcatattaaacggtatcaaaacgacgattcaaacgaaagcgccaattgccttatttgcggatacgaatgtattaaaagaagcgccccgttcaatgacagccgcgggcttcggagacatgctcggaaaaataacatcgctggcagattgggagatttcccgcaggcttgcgggtgagccgtactcagaagccggggcgaagcttgtgaaagacgcgctttggcagtgcattgatcaccgcgctgccattgccatgggaacggaggccggcattcagatactgatggaagcgctgatcgtttcgggtcttgtcatgcttgcgcttgaccactcccgccccgcctcaggaggagaacatcacatctcgcattggattgagatggaaatgctgaaggcaaaacagcctccgattctccacggtgcgaaggtcggttgtgcgtgcgcggtgctgagtgatacttacaaagaactggcttgtcacgaaaagcttgctgaactgccgccgcactttcgcgaggcgattcaatctgcatatgaagggcttcctgacggcaagacaattgccgggtggctcgcatctgcgggaggtcccgcctgtttcgatgagatcggtgtaaaacaggaccttgtcagcgatgcgcttaagcatgcgcacacactgagagaccgttataccggtttaaccatcataaatgaaaatgcagcgctctttgcacatcatttgcatcaatagccgcacggcctaaagtggaaggggtaatgacatgaaaaaaacgaccgctgtatgtttggtgctgatgatgctcttcttgtttaccgccggctgttcacaagaacggactgccggccggccgggagaaacggagctgacgttttggacgtttaacggtctgcacgaacagttttatcaggaaatggtcaaagaatggaatcagaaatatccggatcgcaaaatcaagctgaataccgttgtttatccttatggacaaatgcatgataatttatcggtttcgctgatcgcgggtgaggggcttcccgatatagccgacgtggaattaagccggttctcgaactttctgaaggggaaggatatcccgcttgccgatctgacgccgctgattgaaaaagaccgcgataagtttgtggaagcgcgtctggccttatacagcaaaaacggaaaattgtacggccttgatacacatgtggggacgaccgtcatgttttacaacatggatatcatgaaaaaagcgggcgttgatcccgcctccattaagacatgggaagattaccggcgggcagggaaaaaagtgcgtgaagccgctgggaaaccgatgggaacggttgaaacaaacgactccgccacattcctatccatgatttcgcagcaagggtcaggctactacagcaaaaacggaaaattgattctgaacagcaagacgaatacagacacactgaattatgtaaaggacatggtaaatgataaaacccttctgccggctcccggcggcggccatcacagcgaagaatactacggttttatgaatcaaggcggggcagcctcagtgctgatgcccatttggtacatgggacggtttatcgattatatgcctgatttaaaaggaaaaatggcgatttaccctatgccggcctggaaagaaggcggtgacagatcagcgggtttaggcggaacagccaccgtcgtgccgaagcaggctgaacatctgaagctcgcgaaagaatttctcggttttgcgaaaggttcgaaggaagggaatataaagctttggacggtgctcggctttgacccgctccgctgggacgtgtgggattcaaaagaattgaaggagaaaaacaagtacacggatttcttccggaacggtacgtcaattttttcctcgctccttgaaataaaagatgagatcaatccgatttatctgcatgaagacttctctaaagcggctgatctcgttgtcagacaagtgctgttcgatgcgctgaagacgcaggaaaaaacacctaaggaagccttggacgaggcggcagagcaattagagaaataggagaagccgccctatttaacagtgaaagcgggggagcttttatgagacctgtaaagacagagacagcgcaaaccgtttctgcagtccggaagaagccgcgccggcgcaatgtgctgtattcaaaaaaagcggcgccttatctttttacggcgccatttatcatttcgtttctcgttttctttttgtatccgattatcagcgtgtttatcatgagctttcaacggatactgccgggagaaattacatttgtcgggttttccaattataccgctcttcttaatccaaccttttatacggcattatttaacacattggaatataccttctggacgctgatcgtgctgattccggtgccgcttcttttggcggtgattctgaattcgaagctcgtcaggttcagaaatgtgtttaaatcggctctgtttgtaccggctttaacatcgacgatcgtagcggggattattttccgtctgatgttcggagaaatgaatacgtcgcttgcaaacgagcttatgatgaagcttggcgcatcaccccaaaactggctcaacaacaaaggtaccggcatgtttttaatggtgctgcttgcgtcatggaggtggatggggattaacattctttactttctggcgggattgcaaaacgtgccgaaagaattgtatgaagcggctgaaattgacggggcgagtacgtggaaaaagttccggcatattacccttccatttttaaagccggtgtccgtttatgtgttaacgatcagtattatcggcggtttcagaatgtttgaggaaagctatgtgctttggcagaataattccccgggcaatatcggcctcacgcttgtcggttatttatatcagcaggggcttgcatacaacgaaatggggtacggggccgcaatcggaattgtccttttgcttgtcatcttactagtcagtcttgtttcactgaaactgtccggttcgtttaaaggggagggataagcgttgcgtaacaatcacatgtcttccgtgtacagagttgcgtttaccttgttttttatcatgctgagcctgttgtatatctttccgatgatctgtctattgctcggttctttaaagccgtcatctgagctgatgcgtatcgggctgaatctgcgccttgatccggatgtgatgagccttgataactacacctatttgttcaacggggggagcatttatttcaaatggttttttaacagcctgctgctcggcgttctcaccacggttctcacgctgtttttttcctctttgatcggctacggactcggtgtctacgaatttaaaggcagaaatattattttcgttcttgtgctgatcattatgatggtgcctcttgaagtgatgatgctcccgttgttcaaattgacggtgggtcttcatttgatcgattcttatactggggtgattctgccgtttattgtgtcgcctgtcgccgtgttctttttccggcaatatgcgctcggacttccgaaggatctgcttgattcagcgagaatggacggctgcaccgaattcggcatttttttcagaattatggcgccgctcatgaaaccggcattcggggcaatgatcattcttcaatctttaaacagctggaataactttttatggccgctgatcgtgcttcggtcgaaagaaatgtttacgcttccaatcggactttcagggctgctgagtccgtacggcaacaactatgacatgctgatttccgggtccgtttttgcgatactgccggtgatcatcatattcttgtttttccaaaaatacttcatttccggactcacagtaggcggagtgaagggatagagagagggaggaaatataatgaaaaaagcggggattacagcagataaagaatatatcatcggtgaagtggacaaacggatgtacggatcatttatagaacatatgggccgggcggtgtatgaaggcatttatgagcccggacacccgaaagccgacaaggacggcttcagaacagacgtgcaggagttaatcaaggaattgcaagtgccgttcatccgctatccgggagggaattttctctcgggctacaattgggaagacggcgtcgggccggtgaaggaccgcccgcggaggcttgatttggcatggcagacgacagaaacgaacgaagtagggacgaatgaatttttaacgtgggcgaaaaaagtgaacgccgaagtgaatatggcggtcaatctcgggacgagagggatcgatgccgcccggaacctcgtcgaatactgcaaccatcctgaagggtcatactggagcgacttacgaaaatcgcacggatatgaaaaaccttacggcatcaaaacatggtgcttaggaaatgagatggacggcccttggcagatcggtcataaaacggcgcatgaatacggacggctcgccgctgaaacggcaaaggtgatgaaatggacggacccgacgatcgaattggtggcttgcggaagctcaaacagcggcatgccgtccttcatcgagtgggaggccgaggtgcttgagcatacgtacgagcatgtggattacatctcactgcatacgtattacggcaaccatgaaaatgatcttgaaaactatttggcgaagtcgatggatttagaccattttattaaatccgtcacagccgtatgtgattatatgaaagcgaaaaaacgcagcaaaaaaacgattcacctttctttagatgaatggaatgtgtggtatcactcaaatgaagcggataaaaaagtggagccatggattacggcccggccgattctcgaagacatctacaattttgaagatgcactgttgatcggttcactgctgattacgatgctgcagcatgcggacagacttaagatcgcctgtctcgcccagcttgtcaacgtgattgcgcctatcatgaccgaaaagggcggagaagcatggaggcagccgatcttttacccttacatgcacgcctctgtctacgggagagggacttcaatgaagctgctggtcacctccccgaaatacgactcagcggattttacggatgtgccgtatgttgatgccgcggccgtttaccatgaagaggatgaagcacttaccatttttgccgtcaacaaaagcaaggaactgatggaaacggagatcaaactgagggggtttgaagattaccgcatcattgagcatatcgtgctggagcatcaggatatgaaagcgaccaatcaaaaaaacagaaaagaagtcacgcctcactcaaacggaacgtcttcggcaaatgctgaagggataacggctcattttactccgctgtcctggaatgtcatccgtttatcaggcaaataatgttccgaaaagccgggctgcgccgccggcttttttttacgcaaaaatcatctcccgttatctgataattgtgataatatttagaaaaagagaaaaggggctgggattaaatgaatgcgattacaatcgtcatagcgtctatatgtattctggcgatcgcctatcggctttacggtacctttatgatggtcaaagtattaaaaatcaatgatcagacaccgactccggcccatgtgcttgaggatgggaaagattatgtgccgacgaataagtgggtgtcattcggccaccacttcgcggcaatcgccgctgccggcccgcttgtcggaccgattctggcagctcagttcggctatctgcccgggcttttatggctgttaatcggggcggtgatcggaggagccgtgcacgatattgtcgtattgtttgcatcaatgcggaaaaacgggaaaacgctttctgaagtcgccaaagaagagctcggcccggtggcgggtttttgcacgggtctctcgatgctgtttatcattacgatcacgatggcggggctgtccatggttgtgctgcacgcgcttgagaaaaacccgtggggaacgtttgcggtgggcattacgattccgatcgcgatgggggtcggcctctactataaaaaaacgggcaatctcaaactcgcatcaactgtcgggtttcttttgttaatggccggtgttgtcatcgggccgcggctgcagacaacggctctcggggacatgctgacactggatgcgaaaacgcttgcagtggcgcttcctgtctatgcgtttttcgccgcggcgcttccggtttggcttttgctggctccgcgtgactatttaagcagttttatgaaaatcggggtttttgccgctttgatcgcaggcgtctttttcgtcaatcccgccattaaatttccggccgtaacggagtttattcacggcgaagggccggtgatcgcgggtcctgtctggccgtttatttcaataacgattgcctgcggcgccatttcgggttttcatgcatttgtcggttccggcacaacaccgaaaatgctggataaatggagtgatataaagccggttgctttcggagcgatgcttgtggaatgtctcgtcggaattatggcgctcattgcagctgccgctcttgagcccgccgactattttgctattaacagcacgcctgaaatattccgcaccctcgggatgaatgtcgtccatctgcctgaattgagtaaagaaatcgggctcagtctggaaggaagaacgggcggcgctgttacgcttgccgtcggaatgacgtatatctttacggagattccgtttttcagtcatttggcttcatacttttttcaattcgtcattatgtttgaagcggtgtttattttaacggcgattgatgcgggaacccgtgtcgcccggtacttgattcaagagtttttcggagaggtctataagccgctgaaaaaaacagactggctgccgggctcgattttctcaagcgcgctcgcctgcctgctgtggggctatcttctgtattcgggcgacatcagctccatttgggcgctgttcggcgtatccaatcagcttatggcgtctgtcggcttaattatcggtgcgaccgtcgtattaaaaatagcggataagcggcgctatatgctgacatgcctgattcctctcgcttatttgtacgtgaccgtcaactatgcgggttattggatggtgcggtatgtgtatttgaaccccgaagcggcgggatacaacgtgctgaatggcgttttatccattatcatgctcattctcgggcttgtgattatcattgcggctgtgaaaaaatgggcgaatgtatggcgtgatccgagtgccagactagaagcttcaatacccggataaatccgcggccgtccgaacattgcagcatcataaaaaagcagagagccgatatgtctctctgctttcatcttatgacaaatccgccgcttccaaaaggtaatccgccaaatgaaccgcgcggacacggcctgttaatccttcgcgtaaaatgccgagctgcatttgcagaaggcatccgggattggctgtcacgatgacggccgcctccgtttttccggcggctttcatcttactgtctaatattttcatagacatctctgactctgttatattataaattcccgccgacccgcagcagctgtcggccttttccatttctctgtactcagcccctttaatgcttttcaaaagcgtgcgcggttcctctgacgtatgcatcacattgcggagatggcaggagtcctgatatgtgacgatatgaggagactgcgcccgcaggtttttttgatggaacttcagatcaaccagtacggatgaaaagtctttgagcttccggacgaattgttcggcacgttccgcccatccaggttcatctttcagtaaatgcggatattcctgaagaaaggcgccgcatccgccggcgtttgtaatgatataatcagcgtcaagcgcctcaaaagccgcgatattccgcttggccagttcttttcccatctctttttctccgctgtgcccgtgaagcgcgccgcagcacgcctggccgtccggaaccgcgatttcacacccggtcgcctgtaaaagcgccgttgtcgcatgatttgtcgctaaaaacatcgtatccattaagcagcccgagaaaaaagcggcccgtttttggacgggacccgcggcaggaagaaaacgcggcctttccttcatgtctttccgtttcggggcgggcgggagcacttgttccattgtgcgcagatgttcaggcaaaacgcgcagcataccggtttttctgacggcggtctgcagtcctgatctttggtatattccgagaagattcacggctgtctgcatgcggttttgatgagggaaaagcccggtgaaggcggctttccgcaagaggcgcacgcccggcttatgttttttattttgatgaatgatatccctcgcttcttcaagcagctgtccgtaattgacccctgccggacaaacgggctcgcatgcccggcatccgagacacagcgaaagtgagcgctcgacatcttcatccggctcgatcagtccgtcagtgacggctttcatcagggcgatccggccgcgcggcgaatgggattcttgaaatcccgattcaatataggtcggacaggaaggaaggcagaagccgcagcgcatacagttcagcaattcaccttcatccatgcgggttttgaattctgtttgaatttgttgctgctctttagccgttgtcatttcatcaccaccacgcgtttccttgatgaattggcgaatatttttcccggattcagcagattttggggatcaagcgcttgtttgatcgctttcatggcggtgatgccttctgttttcagtttcatttctaaatacggcgcttttacgatgccgaccccgtgttcacccgttatcgtcccgcccagctcaatcgctttttcaaaaatggcggcaaaagctttttcgacacgttccatttcctctgtatttcggatatcggtggtgcacgtcggatggaggttgccgtctccggcatggccgaatgtgcagatggacaggccgtatgtttctgcaatctcgttaatggctttgaccatgctcgcaatttgtgatctcggcacggtcgcatcttccagaatcgttgtcggtttcagccgggcaagggctgataatgcggaccgtctggcctctgtaagcgcgaatgcctcttcctcggtttcagccgtttggacggatacggcggctccgtttttacaaatcgcttcgattttttccatatctcgtctgaccgtgtcgatgtcaccgtcctgttcgatcagcagcaccgcttttgcgtcggtcggaagcccgatcttggcgtaatcttcaatgacctgcagtgtcggctgatccagaaattcgagtgtcgccggaatgattttttcagcgatgatggcagaaaccgattccgcagccgcttcaatatgttcatagagtgcaagcagcgtttttttcgtttccggcttcggaaccagctttaaagtcgcttccgtcacaacgccgagcgtcccttctgatccgacgaaaagccgggtcagatcataaccggcgacatcctttgtcagctttcctcctgtgcggatgatatcgcctgaagccaatacggcttcaaggccgaggacataatcccgggtgacgccgtacttcaaaccgcgcagcccgccggaattttcattaatattcccgccgattgtcgatattttcatgctgctcggatcaggcggataaaataaacctttttgttcaaccgcacggatcatatcttgcgtaatcacgcccggctggacggttgccgtcaaattttcttcatcgatttctagaatgcggttcatatgtttgaataaaagcacaagcccgccttcagacggacatgtgccgccgcataggtttgtgcctgaacccctcggcacgatcggaatgtcatgcctgctgcaaatcgttaatatacgggacacgtcatccgcgctgcggggggcgatgaccgcatccggcatggcttgcagctgaggagccgcatcataagaatacacaagacggcccgccgccgaatcatcataattctccttcccgaccgtccggatgaacgcttcttttgcctctcgtgaaatcatgttctcccaacctccctgataagaaaagcgttttcatttaattgtaaagaaaaacgattccgcacactatggagaaacatatgaaaaatgatgatatgattacgtgctttttgtatgttgatctaaaaagcgcagcgccaaataaaaagccgttatgtcttcagggcggtccagcttcatatttgtcagtgattccagtttggaaagacggtagcgcaatgtgttgatatgaatatgcatgtcgtcggcggtgcgctttaacgataattgccggtcgaaaaaggcgcgcagcgtatccagaagttcttcccggccgagtacatgctcgagaacccgccgtgaaaattccgacttcgtgcggggtgtgatatcggtaagacacatatccagttttaaatcttcttcaaagacggcctgcttgtcaccgattccggctgaaagtgctttatctgcctgttcgtatgattccgtgaggcgctctcccggaacgatccgtccgatgccggcggtgacatgctgcccaaaaacggctccgatctttttaatgagctgtgttttggaagccgaatttgcttcatgattaatgagaattcgttcatttccccagcggacaaacaggtcttcagggcattcgtactgccagagccgcccgagctcctccgctttatattgctcataacgtccttgaatgagtatgatccggcggtatgcgtgaaggtctgtgccgatgagctttgctttttctaaaaagcccggagaccattctttcagctgcagccaatcaaccataaaggattcaagcattctcgcacgccactgcgcttcttccatatggcgcgtttctttaataaacagctccgtcatttttctgagcaattctccgaaaggcaggatatcgtcagggtctcctgtcaggccgaatactccgatcacttcatgacctgaaaaaacggggaggttcagtcctgcttttacgccctcgagccgtttttcatcttctttcgtaatgatgacattccgtttttcgcgcgcgcagatcagtgcgccttcatgaaaccatccggcgcgcgcctcgttggtgcccgcgatgatcatgccttttgtatcggcaataatcacttcgcggctgtacatatgtttgacttcggcaatcaatttctttgccagttccggctgtaactgcatggcgatccccctcgccattattatacaaaaaaaaccgggtgtcccatcacccggttcatgcttattgcgcaggttttaatccgccttcaagtgttttgagcatttcatttttttctgagtccgacgcatgctgccaaagaacttcgaataagacgccgaggcccggaagcattttttcttcaccgctttggatggcgtcaacgatagtatgctccagctgatcctggttattgccggttacattggcaataacggcgttgcgtaaattaagatccattacaaccgctcctttttctgaatgtgatacgcatattcttaccgcgcacgcggtttattatgtgctgttcttaagatataataacaacatgcatgaaaaaaggagagcacagacataaagtgaaacgaatcgactctgcaaaaaaccaaaaagtgaaggactggaaaaaacttcacacaaaaaaagagagacttaaaacgaatacatttctgatagaaggagagcatctggcagaagaagcgctcaaatcaaagggaacggtaaaagaaattctcgtaaacgatgagagcgccatcccggccgatctggacatgagcattccgtgctacgtgctgagcgaagacgcgttttcagccgtgacggaaacagaaacgccgcagcggatcgccgcggtctgccatatgccggataggcagcctgatcagctgaagcggctgcttctgattgatgccgtgcaggacccggggaatttaggaacaatgatcagaacggcagatgcggcgggaatcgacgccgttgtccttggtgagggaacagcagacccgtacaatggaaaaacgctgcgttcagcacaaggttctcattttcatattcccattttgaaacgtccgcttgatgagtttaccgctgagctgaaatcacaaggcgtcgcgatctacggcacggcgcttgaaaacggtgcggcttatcaaagcgtgaagcctgaagaatcgttcgcgttaatcgtcgggaacgagggggcgggagtggacgccggccttctgcaaaaaacggatctcaacctgtacgttccgctgtacgggcaggcggaatcgctgaatgtggcggtagcggccgccatcctcgtttatcatctcagaggataggttgcgaaaagccttggatttcactataatagatagcaataatgtaaaaaccgtgacagaggacgtcaatttttgcacacactgccttccagggagaaaatgccgctgactgagagcatttttatcgcagcacaaaaattgattttcacctctcgagttgtcaccgggaccgcgccaaacgcgcgtaaaggtgaaccggaacgatcgtttccgttatgtcaatgaagctgtcggcagatgaagtctgccttaaaaagggtggtaccgcggccacaactcgtcccttctctcaaggggcgggtttttttgttttctgaaaaaggcatagaacggtttggtttacataaaaggaggatgcatgatggaagagaagcttaaacagctcgaactggaagctgcagaaaaagtagaagcggcgggttcattaaaagaagttaacgacattcgggtgcaatatctcggaaaaaaagggccgattacagaagttctccgcggcatgggcaaactgtccgccgaagagcgcccgaaaatgggagcgctcgccaatgaagtgagagagcgcattgcagcagccattacggcgaaaaatgaacagcttgaacaagaagaaatgaataaaaaactcagcagccagacgattgacgtcacgttgccgggcagtcaggtaaacatcggcggacgccatccgctgacggtcgttattgaagaaattgaagatttatttatcggcatgggatataccgtcgaagaaggccctgaagtggaaacggattattacaactttgaggcgctgaacctgccgaaggaacatcctgcccgcgacatgcaggacagcttttacattacagaagaaatgctgatgagaacgcagacgtcaccggtgcagacgcgcacgatggaaaagcataaaggaaaaggccctgtcaaaatcatttgtcccggtaaagtgtatcgccgcgacaacgatgacgcgacacattcccatcagttcatgcagatcgagggtctcgtcgtcgaccgcaaaatcagcatgagcgacctgaaaggcacgcttgaattggtcgccaaaaaaatgttcggccaagaccgtgaaatcaggctccgtccgagctttttcccattcacagagccttctgtcgaggtggatgtgacctgctttaagtgcggcggacaaggctgctccgtctgcaaaaaaacaggctggatcgaaattctcggcgccggcatggttcacccgaacgtgctgaagatggccggattcaatcctgaggaataccagggttttgctttcggaatgggtgttgaacgtatcgcgatgctgaaatacggcattgaagatatccgccatttctataccaatgatgtcagattcatttcgcagtttaaacaggcgtaagaggaggatacacatgtttgtttcttataaatggttagaagattacgttgacttgcagggaatcgacccggccgtgcttgcagaaaaaattacgagagccggtattgaagttgagggtatcgagtataaaggggagggcgtaaaaggcgttgtcatcggacacgtgcttgagcgcgaacagcacccgaatgccgacaaactcaacaaatgccttgttgatatcggtgcggaggaacccgtgcagattatctgcggcgccccgaatgttgataaaggacagaaggttgccgttgcaacggtcggagccgtgcttcccggcaatttcaaaattaaaaaagccaagctgcgcggcgaagcgtctcacggcatgatctgttcccttcaggagctcggcattgaaagcaagctcgtggcgaaagaatatgcggaaggcattttcgtttttccgaatgatgctgaaacgggagctgacgcaatggcggcccttcagcttgatgatgcgattttagaattgggcttaacgccgaaccgcgccgacgcgatgaacatgcttggcgtggcttatgaagttgcggctatcctcggcgcagaggtaaagcttccggaggcttcatatgaaaaagcggcagaaaaagcggcggatgctgtttccgttaaggttgaagatacgcaggccaatccgcattatgccgcaaaaatcattaaaaacgtcaaaatcggcccgtctccgctatggatgcagacgaagctgatgaatgcaggcatccgcccgcataataacgtcgtggacattacaaacttcgtcctccttgagtacggacagccgcttcacgctttcgattacgaccggttcggttcaaaagaggtcgtcgtcagaaaagcggcggaaaacgaaaccatcgtaacgctggatgaacaagagcgcaagctgtcaagcagccatttggtcatcacaaacggaaaaaaagcgcaagccgttgcgggagtcatgggcggagctgagtctgaagtccgtgaagacaccactgcgattttactggaggccgcttatttcgacggacagaccgtccgcaaagcgtcgagagacctcggattgagaagcgaagcgagcgccagatatgaaaaaggcattgatccggcacgcgttttgctggcggctgaacgggcctgcagtctcattcaggcatatgccggcggagaagtgctctcaggcacggttgaagaaaaccatctgaaaatcgaagcaaacaatattcacgtgtctgttgaaaaagtgaacgccgtgctcggcatgacaatcgctaaagaagaaatcatcagcatttacaagcgcctcgggtttgcagtcggtgaagctgaagacgttctcgtcgtaacggtgccgtcgcgccgcggagatattagaatagaagaagacctgattgaagaagcggcgagattgtacggatatgacaatattccgtccacgcttccggaaacggccggcacgacaggcggcttgacaccgtatcaggcaaaacgccggaaagtgagacgttttcttgaaggagcgggtctttcacaagcgaccacttattcattaacgaatgataaaaaagcggccgcttttgcgatcgaaaaatcattcaacacgatgcttgctctgccgatgagcgaagaaagaagcattctcagacacagcctcgtgccgaatcttcttgaagccgtttcatacaatctggccagacagactgattccgttgctttatatgaaacgggttctgtatttctgacgaaagaagaaaacacaaaaccggttgaaaaagaacgggttgccggagctgtaaccggattgtggcgcaaaaatttatggcagggtgagaaaaagccggttgatttcttcgtcgccaaaggaatcgttgaaggcctgctgcatcaattgaatgtgtcagaccgggttgaatttgtccagtcagaacgcaaaaacatgcatcccggccggacggcaaacattctattgaacggttcgcttgccggatttatcggccaggtgcatccggcaatggaaaaagagctggatatcaaagaaacgtatgtgttcgagcttgatctgcacgcgcttctgaccgaggaaacagaacctgtcgtgtatacgccgattccgaagtacccgtccgtcacgcgcgatattgcgcttgtggcagataaaaccgttacaagcggacagctcgaagccgtgatcaaagaagccggcggcgcgctgctgaaagaagtcaccgtatttgatgtgtacgaaggtgagcatatggaagagggcaaaaaatccgtcgccttctcgctccaatatgttaaccctgaacaaacattgacagaagaagaagtgacaaaagtacatgaaaacgtgctgaaagcgctggaagaaacgtatcaggccgtattaagaggataaagaaaaagcttgcagatcactctgcaagcttttttattatgaccgcttccgttcaacaaggcgtttcgctttttgcgtattggcaaaatgaagtttggtgaacgttctgagcgcaccttctcccttattgatgatcagcttggcggcagcttcatcgacatgcggccccgcgcctttcggaatcgtcatcccagcctctcgggaaagcttatccatttcaattaagaaagaatatcgcgcaatgatagaggctgcggcgacggaaagatgtatgctttccgctttcgtgctgaaaaacgttttttcttttacgatatcccgtccggaaagatgcttaaaataaatgccgggctctgcgaattggtcaatcagaatcgcttccggtttaacgccgttcatttttctcagcagattggaaatcgcctgattatgaaggagcgccttcatttttccttggctcatgcctttttcctgcatctgattgtatttttcgttttttaacacaagcaggctgtaaggaatggttttaattaacagtttggcgatttcaataatctgcggatcttttaaatccttcgaatccttcacaccgagttctttcattaaagaaagttttgttttgtcggcgtaggcgcaggcaaccgttatcggcccgaagtaatcgcctgttccgacttcatcagagccgattactgacatggaggcaatgcccgccgggggagcgtagagcgggtcggccgcttttttgacggttttctttgctttcggcgcctcagccgttccccagcgggccgcttctgtgccggcgttttttccttgaaagagaaccttgcccgagcggtaggctgtaatggtacagcccggaggcttggcctggaagacggcgccctgcggaacggcgggagtaagggagccggcataggattgtttcatttgttccatagcggaagcggatacttttataacagaatgggacacgatataatctccttttttggcacttttcactgtatataccagtgtatcataacagcccgaggctcgtctttccattcaaacgataatcgtggtatgataggaactaggattctcgcggaatggaggagaaacgttgtctgacggcaaaaaaaccaaaacgacagtaaacatttacggccagcacttcaccattatcggggaagaaagcaaagcgcatatgcgccatgtggccggagtggttgatgataaaatgagagaaatcaacgagaaaaatccatatcttgatataaataagctcgctgtattgactgcggtcaatgtcgtgcatgattatatgaaactgcaagaaaaatatgaaatactggagcggcagcttaaagaaaaggaatgaacaccatatgatagatatcatcatcttagttttgctcttaatgggcacattgcttggattaaaaagaggatttatcctccaatttatatatttaacgagtttcatcctctcgattgcgtttgcggcgcttttttacaaaaatctggccccgcatctgagctttatacccgcgcctgatttttccggcgggcaggcggctctgtcttttattaaaggaaacgtagagacggcttattacaacgcgatcgcgtttgtcattttgtttatcatcgcaaagattctgcttcggattatcggagcggcgcttaatatcatcgccagcattccggtcattaaacagatcaacaaactgctgggcggggtgcttgggtttctggaagtctatttatttgcgtttatcctgttatacgtcgcatccgtactgccggtaagcgcgcttcagggtatgctcgcacaatcgacgcttgcaaatatcatcacacatcatacgccgtatctgtcagggctcctgcaagaactgtgggcccagtacggggcataaaaaacttctcttgaccggagaagtttttttcaagctctgcgtcagttgtgccggaggagaaaaatttgtatgatgaaaagcaggaaacgactgggggttaacagtatgcataaaaaagatatcatcaggctgcttgaaacgattgcggtctatatggaactgaaaggggacaacccgtttaaaatatcagccttccgaaaagcggcagcggcgcttgagcaggatgaccgcagcctgtcggaaatcgacgacatgatgtctttatccggaatcggaaaaggcacctacggcgtcattcgtgaatatatgcaggaaggtgtgtccggcacgcttctccaattgcagaaagaagttccggaaggcttggttcctcttttgaagcttccgggcctcggcggcaaaaaaatcgccaagctgtatcaggaactgggcgttcatgacgcggaatcgctgaaagaagcgtgcgagcagcaaaaagtacaggggctcgccggtttcggcaaaaaaacggaggagaaaatccttcaggctctcggagaagccggaaaacagccggaacggtttccgatcggctatgcgctcggcattgcttcagtaattgaagaacatttagcccggctgacggatattcagaaatattcccgggccggcagtctcagaagagcgcgggaaaccgtaaaagatctggattacattatcgctacagatcatccggaggctgtcagagaacagcttctttccctcccgaacgtaaaagacgtgatagcgagcggggacacaaaagtatcagtcatcctgacctttgaatatgagacgagtgtggatttccggcttgtgacagaggaacagtttgccaccacactgcatcattttaccggttctaaagatcacaacattaaaatgcgccagctggcgaaagagcgcggtgaacggatcagtgaatacggagtagaaaccatagaaacaggagacgtcaaaacattcccgagcgaagaagcgttttacgcccacttcggtctgccgtttattcctcctgagctcagagaaagcgggcaggaggtcgacacgtaccgggaagaaacggatcttgtggagcataaagcgataaaaggcgatctccacatgcactcagcctggagtgacggcgctttttccatcagagaaatggcagaagcgtgtatggcaaaaggctatcagtacatggcgatcaccgaccattcccaatatttaaaggtagccaacgggttaacggccgaacggctcaaaaaacaggcggaagaaattgacgcgttaaatgctgaatttgaaaattttcatatttttaaaggcgtagaaatggatattctccccgacggttcgctcgattatgatgacagtgttctgtctgaaatggatcttgtcatcgcatctattcattcaagcttcagccagccggaacatgtcattatgaaacggcttgaacaggcgctgacgaataagcacgtggacattatcgcccacccgacgggacgcctgatcggcagacgggccggctatgaagtcgacatcgacatgctgattgaactcgccgccaaaacaaatacggcgcttgaactgaatgcaaaccccgcgcgtctcgatttgcggactgagcatctgatcaaagcaaatgaaaaaggcgtgactttggtcattaatacagatgcccataatatcgagatgctcgatgatatgaaaacgggcgtgaccgctgcgcgcaaaggctggacggaaacaaaacatgtgttaaacgcccggccgctacacgaggtcaaagcatttctgacgcgcaatgattaagtaaggaggatcacaaaaccgtgcagcaaaaagtgttatcatcacttgaatttcataaagtaaaagaacagattaccgcacatgccgcctcatcgctcggccgggagaagcttctgcagctgaaacctttgacggatctctcagacatccaaaaacagctggatgaagtcgaagaagcatccgcggtcatgcgcttgagaggccatgctccgttcggcggcctgaccgacataagatccgctttacggcgggcggaaatcggcagtgtgctgacgccggcggaatttaccgaattgtccgggctgctgtatgccgttaaacaaatgaagcactttatcagccaaatgacagaagacggcgtcgacattccgctgatacaggcccatgcagaagaactgattacattgggcgatttggaaagggagattaactcctgcattgatgatcacggcgaagtgcttgatcatgcatcccccgctttaaggggaatccgcacgcagctcaggacacttgaatcaagagtcagagaccggcttgaatcgatgctgcgttcatcttccgcttctaaaatgctgtctgacaccatcgttacgattcggaatgaccgctttgtcatcccggtcaaacaggaatacagatcaagctacggcggaattgtccacgatacatcttcatccggtgcgacactgtttattgaaccgcaggcgatcgtagatatgaacaactcgcttcagcaggcgaaagtaaaagaaaaacaggaaatcgaacggattctccggatgctgacggagcatacggctgaacacacacaagaaatcgctcaaaatgtggaagtgctgcagacactggatttcattttcgccaaagcgcgatacgcaaaagcaatgaaggcgacaaaaccactcatgaacggagacggctttatccggctgaaaaaagcgcgccatccgctgctgccccaagatcaagtcgtggccaacgatattgaactgggcggagattattcaacgatcgttatcacgggaccgaatacgggcggtaaaaccgttacgttaaaaacactcgggctgctgacgataatggcgcaggcgggattgcacataccggctgatgagggatcggaagcagcagtatttgacaatgtgtttgccgatatcggcgatgaacagtcgatcgaacaaagtctgagtacgttctcatcccacatggtcaatatcgtcaatattttaaaagacgtgtctgaaaacagtcttgtgctgtttgatgaactcggtgccggaacagatccgcaggaaggagcggcgcttgccatgagcatccttgacgaagttcaccggacaaacgccagagtgcttgcgacaacccattatccggaactgaaagcatacggatataacagacaaggcgtcatgaatgccagcgttgaatttgacattgaaacgctttcgcctacctataagcttctgatcggagtgccgggccgaagcaacgcatttgaaatctcaagacgccttgggcttccggagcatatcatcggccaggcgaagtcagaaatgaccgccgaacataacgaagtcgatctgatgatcgcatcgcttgaaaaaagcaaaaaaagagcggatgaagagctttctgaaaccgaatcaatcagaaaagaagcagaaaaactgcacaaagatcttcagcagcaaattattgagctgaacgcccaaaaagataaaatgatggaagaagccgagcagaaagctgcggaaaaactggaagccgccgcaaatgaagcagaacagattatccgcgagctcaggtccatcaagcaagaacacagatcctttaaggaacacgagctgattgacgccaaaaaacgtctcggagacgcgatgccggcttttgaaaaatcaaagcagccggaaagaaagacagagaaaaaacgcgagctgaagccgggcgacgaagtaaaggtgctcacattcggacaaaaaggggcgctgcttgagaaaaccggcgagaaagaatggaacgtccaaatcggcatcctcaaaatgaaggtgaaggaaaaagatcttgagtttctcaagtccgctcctgaaccgaaaaaagaaaaagcaatcaccgccgtaaaagggaaggattatcatgtatcccttgaacttgacctcaggggagagcgttacgaaaacgccctcagccgcgtcgaaaaatatttagatgacgcggtgcttgccggccatccgagagtgtccatcattcacggaaaaggcacgggcgccctccgaaaaggggtgcaggatcttctgaaaaaccaccgcagcgtgaaaagctcgcggttcggggaagcgggagaaggaggatcaggcgtaacgattgtcgaactaaaataaaaagggagtaaacgtcatgaatgctttttgggaaaatgagcttgttgaaatcgcggcttattacagtgtagccgtcttgtgtctcgtcatttttctgaccgtgtttgaattggtgacatcctataaaaactgggtggaaatccaaaaaggcaatcttgcggtggcaatggcgaccggagggaaaattctcggtatcgcaaatgtctttcagcacagcatcgcccagcataattcgcttttgcaaatgatcggctggggcgtatacggatttattatgcttttaatcagctattttatctttgaatttctgacgccccggtttaaaattgataaagaaattgaaaaagataacagagctgtcggctttatttcatttgtcatctcagtcggcctgtcatttgtggtggccgccgggatttaaggggacggggaaaaatggagaagcttgcgaaagtgctgctgtcggcagcgggaatttttctgttcatcggacttatttatctggtcatgacatcttaatactgaaaaaaggctgccgaactaaaatcggcggccttttttattgagaataccagtttatgcaggccgtatcagagcaaatgacggcttcccaactcatggcgcggatgacagacggcatgtcttgatcttccataagaaagagtgtcgtaaaagaatcatatatgctcataaaagcggcgcgccgtttttcgtcggcaatgatcatgtcagcccgcagcagtccgcatacatccgaagccgccgtttgattgagtgaaattatgcctttctcttcgaccggctcataataagtgcagcgctttatgccttttgaacggaacacatccaaaagtcccggaattaaaaatggtgaagtgacatcatcgctcggcaagtacagatcgggatgaagccgattaaacagcctggcggattcaggatgtgcatattcctcccgcagtgccgtgacagcagtcataagcgcaagcgccgtctctttttcagagcgcaatccgcaaacggtcatgacggtttgccaggaaacgggtctgcccatcgcgatgatctcctcatcactcggatacatatgttcataaggccgtttgcgcttttgctcttcccacccatccggcatccggacaaagggatggagcaaaaaggcggccgacgtaaacggcttcggcagctggcgcaggataggaactccctcttcaaaatgcagcgtttccagcaagctcaacacctcctgaaactcgaaatttcgcatgaaacgctttccaattccaatcacccttctgctataataatagcgtataggaaaacagaagggagaggtattatgcagtctgaaaagccatggctttctcaatatcccgaagagattccgcatgagcttgaatttaccgatcaaaccctgccatccaatctgacaaactccgcagctcaattcccgaaccataccgccatttattttctcggaaaaaaactcacattccaggacgttctcacagattcgttaaagctagccgcttttttacgcaaaacaggcctgaaaaaaggggacagagccgccattatgctgcccaattgtccgcagtcggtcatcgctttttacggcgtattgtttgccggcggcattgtcgttcagaccaatcctctctacacggaacacgagcttgagtatcagctgaaagacagtgcgccgcgcgtgatcatcacccttgatatgctgtttccgaaggtgataaaaatgaaaacgttatcactcgtcgaacgcattattacaacgagtataaaagattttttgccgtttccgaaaaatatgctgtatacgctcacacaaaaacaacaggttcatattgattatgacggctgcgaacaaattcacaaattagcggatattttaaaaaacgaaagagcggaggaagcggagtcatttgatattgacactgcgcatgacatcgccgtgcttcaatacacgggcggaacaaccggctatccgaaaggcgtcatgctcacacaccggaacattcaggccaatacagaaatgtgcgccgcctggatgtacaaaatgaaaaagggagccgaaaaggtgctcggcatcgtgcctttttttcatgtgtacggattgaccgccgtgctcaatttttccattatgcagggatgtgaaatgatccttcttcccaaattcaatcctttggataccctgaaaacaatcgacaggctgaagccgacggtttttcccggggcgccgacgatttacatcgggctgttgcatcacccggagctgaataagtatgatttgtcctccattgaaagctgtccgagcggttcagcggcgctgccggttgaggtcaaacagaaatttgaaaaagtgaccggaggaaagcttgtggaaggctacggattatccgaagcatcaccggttacccattcaaacttcatttggggaaaaaataaacccggcagcatcggctgtccctggcccaataccgatgccggaatctattcagaagaaaaaggcgggcttgcggggccgtatgagcatggcgagctgatcgtaaaaggccctcagatcatgaaaggatactgggataagcaggaggagacggcgcgtgtcatcagagacggctggctgtttaccggagatatgggatatatggatgaggaaggatttttctacatcgccgacaggaaaaaagacatcatcattgccggcggatacaacatttacccccgggaggtggaggaggcgctttatgagcatgaagccgttcaggaaatcgtcgtagcgggcgtccctgattcctacagaggggaaacggtgaaagcatttatcgttttgaaaaaaggcgccgaggcagatgccgatgagcttgatgcgtttgcaagagagcggcttgcgccgtacaaagtcccgaagctttacgaattcagaaaagagcttccgaaaacggccgtcggaaaaatattaagaaggcgtttagtcgaagaggaagatgcttcccgtgaaaacaaggtgccttaaaagaaaaacttgacaaaatccggattcctttttatcatgaagttatgaatgaatagtcattcatttatcgaaggaaggaacgatgacattgaaccaaaaacggccaaagtatatgcagattattgatgcagcagtagaagtcatagcggaaaacggctatcaccaatcacaggtgtccaaaatcgccaagcaggccggcgttgcggacggcaccatctatttatatttcaaaaacaaagaggatatactcatttctctttttaaagaaaagatgggccagttcattgaacgcatggaagaagaagtgaaagaaaaaacgacggcaaaagaaaaactcgccctcgttattaagcagcatttcacactgctcggcaatgaccgccacctcgcgattgtgacccagcttgagctcagacagtcaaatatcaagctgcgcctgaaaatcaatgatattttaaaaggttatttaaacatgctggacaccattttgaccgaaggaatcaagtcgggggaatggaaagacaatctcgacgtccgcctcgcccggcagatgatattcgggacgatagatgaaacagtgacaacatgggtgatgaacgatcaaaaatatgatcttccggatttgtcagacaaggtattggagctgttggtgtcaggaattcatcaaaactaaagggggttgacggatgaacagcctttcgatggcggtagaacaatctgttgcggtgatcaccattaatcatcagccggccaacgcgctatccggtgcggttttagacgagttgtccggtctgttcgaccgatgtgaaacagatgacagcgtcagaagcatcatcattcgcggtgaggggaaatttttctcggcgggcgccgatataaaggaatttacgtcgcttgaaaatcttgagcaatcttctgccatggcggataaaggccagcagctgatggaaagaattgaagggtttccgaagcccgttatcgcagcgattcacggcgctgcgctcggaggcggtcttgagctagccatggcctgccatatcagaatcgctacattagatgcaaagctcggcctgcccgagctgaatctcggcattattccgggctttgccgggacgcagcggcttccccggtacgtcggtacggcgaaagcgcttgaaatgatcggcacttcagaacctgtgtccggagaagaagcgctcagcctcggtcttgtcacgataggcgccgaacatgaggaagagctgctgaaaaaggcgaaaacactcgcgggcaagtttgcggaaaaaagcccgcagtcgatggcttatctgcttgagctcctttattcaaacaagatctattcttatgacggcggcttaaagcttgaagcaaagcgctttggggaagcatttgcatcagatgacgcaaaagaaggcattcaggcatttctcgaaaaaagaaagcctcaattcggtgggcgaagataaaggggataagattatgaatctatttgtactgatgaaacggacgtttgacacagaagagaaaatcgtcattgaagcaggaaagattcaggaggacggggccgaatttatcattaatccgtatgatgaatacgccattgaagaagccattcagctgaaggaagagcacggcggaaccgttaccgccgtaaccgtcggcggagaagatgcggagaaagaactgagaaccgcccttgcgatgggctgtgaccaggcggtgttaatcaatattgaagatgatctgagcgatcctgaccaatactccatttcaactatcttatatcattatttcaaggaccgggaatatgatctgattctcggcggaaatgtcgcgattgacggcggttcaggccaagtggctccaaggcttgccgaactgctgaacattccttgcgtcacaacgatcacaaaactgacaatcagcggcgatgaagctgtggcagagaaagacaatgaaggggataccgaaatcattaaaacctcacttcctttagtcatcacggcacagcaaggcttaaacgagccgcgctatccgtcgcttccgggcattatgaaggcgaagaaaaaaccgctggaagaacttgagctcgatgacctcgacattgatgaagatgatgccgcaccgaagctcaaaacgatcgaacgttttctgccgccgcaaaaagaagcgggcagactgatcgaaggagaagccgctgagcaggcgaaagagcttgtgtcactgctgagaaaagaagccaaagtcgtataaaccgatattaaagaaactgggggatgtcagaatgggaaaaaaagtgatcgtactcggagaaattcgtgacggcgccttacggaacgtcacctttgaagccatagccgcaggcaaaaccatttccggcggaggagatgtcatcggcgtgctgatgggaaaaggcgcggctgatgcagcaccagaactcattcagtacggcgccgacaaagtatttacggccgatgcgccggggcttactcagtatacggcggacggatatgccgcggttctcggggatttgatcgaaaacgaaaagcctgatgcggtcattttcggccacacttctatgggaaaagatttgtcacctaagcttgcggcccggtttgaaacggggctgatttcagacagcacggatgtaagcgttaccggagacaacatcgtttttacaagaccgatttattcgggcaaagcctttgaacaggtgatttcaaccgatccgttcattttggcgacaatccgtccgaacaacattcaggcattagaaaaagacgcgagccgcacgggtgatattgaagagcttgcggcacctccggcagatttgcggacggtcattgaagaagtagtcaaaaaaacggcggacggcgtggatttatcagaagcgaaaattatcgtagcaggcggccgcggtgtaaaaagcaaagatggatttgaaccgttaaaagaacttgccgacgtgctcggagcagcggtgggcgcttcacgcggcgcgtgtgacgcggactattgcgattattcccttcaaatcggccagacgggaaaagtcgtcacgccggatttgtatatcgcctgcggaatttccggagcgattcagcacttggcgggcatgtcaaacagtaaggtcatcgttgccattaacaaagacccggaagcggaaatatttaaaatagcggactacggaattgtcggcgatttgttcgaagtggttccgcttctgacccaagaatttaaaaatgccaatattcattcataatcaaaaccctctggctgatttgtcagagggttttggtttttgttaattggttcggacaaattaaagattaataaaacaatagattgacatgtacgaaccaatgtaataagcttttgtaaagcgcttacaaacttatccattcagcatacatcccagatacatagatcggctgtagtgctttcattcttattaagggaaaggaatgatcaagtttgtctcacaatacggcagtcattcaaactgatatcacacggggaaccattaataaaaacatatacggacatttcgcggaacacctgggaagaggcatatatgagggcatctgggtcggaaaagattccgatattccgaataccggcggggtcaggacggatgtcgccgccgccctcaaacagcttcagattcccgtcctcagatggccgggcggctgttttgctgatgaataccattgggcaaacggcgtagggaaacgcaaaaccatgctgaatacccattggggcgggacaattgattccaatgaattcggcacgcacgagtttatgatgctttgtgaactgctcggctgcgaaccgtacatcgccggaaacgtcggcagcggaacgattaaagaaatggctgagtggattgaatacatgacgtttgaagcgggcacgccgatgtccgactggagaaaagaaaacgggcgggaaaaaccgtggaagctgacatatttcggaataggaaatgagaactggggctgcggcggaaacatgcatcctgagtattatgccgacctttacagaaactttcaaacctatgtccgcaattacagcggtaatgaaatctataaaattgccggcggcgcgaatgtcgatgattaccgctggactgaaactttaatgaaaaaagccgctgatctcatggacgggctgagccttcattattacacaataccgggcgatttctggaaggggaaaggatctgcgacggagtttacggaagatgaatggttcatcacgatgaaaaaagcggcgcatatggatgaattgatcacaaggcacagcgccatcatggatcagtacgatcccgaaaaaagagtcgggctgatcattgatgaatggggcacgtggcttgatcctgagccaggcacgaatccgggctttctgtatcagcagaatacgatccgcgacgcccttgtcgcagccacgcattttcacatttttcatcagcacgcagaccgcgtacagatggccaatatcgcgcaaaccgtcaacgtgcttcaggcaatgatcctgacagaagggaaagacatgctgctgacgccgacatatcatgtgtttgatatgtttaaggtgcatcaggacgcttctcttttggcgacagaaacaaaagcagccgggtacgaatggaatgacggccggctcccgcaagtcagcatttcagcgtccaaacagcaaaacggagacatacatatcagcctttgcaatatcgatcatctgcacaaagctgatgtgaagattgaactgcggggcatgaaaaaggcagggaagccttcgggaacgattctgcacgcggaaaaaatgaatgcccataatacgttcagcagtccggaaaacgtcaaaccgaagccgttttccgggttttctcaaaagggcggaaaacttgaggcggagcttcctccgatggcggttgtactaatcacgctgcctgcgaatccatcttaagttttgaacgcctgccgcccggttataatacactgtataaataagattatttccggcgggatcgggagaaaataatataagcattaaattagcatgaacgaatgggagatgctatactaaaaatcatcatttgacaattggaggaataacaaatggctatcgtaaaagcaactgatcaatcgttctcagctgaaacaagtgaaggtgtcgtattggctgatttctgggctccttggtgcggaccttgtaaaatgatcgcgcccgttcttgaagagcttgatcaagaaatgggagacaaactgaaaatcgtcaaaatcgacgtggatgaaaaccaagaaactgccggtaaatacggcgtcatgagcatcccgacacttctcgtattgaaagacggagaagtcgttgaaacatctgtcggtttcaaaccgaaagaagctcttgaagagcttgtaaacaaacatctgtaagccgaaagcttccgttacggcagggcgattcctttgaaagggaatcgccttttttgatcttccaaaagctgagaatggagaaaaacaaatgttcgtgatacactgaatggacacgagaaatgaatgtaaggaagggtaacgtatgaataaacaactgaaagaaaagctggccctccttcccgatcagccgggctgttatttaatgaaagaccgtcaaaaaacagtcatctacgtggggaaagcgaaagtcttgaaaaacagggtgcgatcttatttcaccggttctcacgacgcaaaaacccaacggcttgtgtcggagattgaggactttgaatatatcgtgacttcctccaatcttgaagcgcttattttggaaatgaatctgattaaaaaatacgatccgaaatacaatgtcatgctgaaagatgataaaacctatccctttattaaaatcacccatgaacgccatccgcggctgattgtcacccggaatgtcaaaaaagacaaaggacgctatttcggcccgtatccgaatgtgcaggcggcgcgggaaacgaaaaaactgctggaccgcctttacccgctcaggaaatgctcaaagcttccggaccgcgtctgtctctattatcatctcggacaatgcctcgccccatgtgtaaaggatatatctgaggagacaaaccgcgagattgttgaagacattacccgttttttaaagggagggcataacgaaatcaaaaaagagctcgaagcgaaaatggcagaagcggcggaaaagcttgaatttgaacgggctaaagaattccgcgatcagcttgctcacatcgaatcgacgatggagaagcaaaaaatgaccatgaatgaccttctggaccgcgatgtgtttgcatatgcctacgataaaggctggatgtgcgtccaagtctttttcatacgccaaggaaaactgatcgaacgcgacgtcagcatgtttccgatgtatcaggaagcggatgaagaatttctgaccttcatcggccagttctactctaaaaacaatcactttctgcctaaggaaattctggtgcctgacagcgttgacagggacatgatcaccgagctgttggaaaccgccgtgcatcagccgaaaaaaggcccgaaaaaagagctgcttttgcttgcgcacaaaaatgcgaaaatcgctctgcgggaaaaattctcgttaatcgagcgggatgaggaacggtcaatcggtgcagccgaacggctcggcgaagcgctgaatatttatacgccgcatcggattgaagcgtttgacaactccaatattcaaggcacaaaccccgtatcggccatgattgtctttattgacggaaaaccgaataaaaaggaataccgcaaatataaaattaaaaccgtaacagggccggatgattacggctcaatgagggaagtcgtcagaagaaggtacacgagggtgctccgcgaaaatcttccgctgccggatttaatcattattgacggcggaaaagggcagattaacgcggcgcgcgacgtgcttgagaatgagctcggccttgatgtcccggtagcgggattggcgaaagatgataaacaccgaacatccaaccttttgatcggcgacccgcttgaaccggtgtttctggagcggaacagccaagagttttacctgcttcagcgcattcaggacgaagttcaccgttttgcgatcagctttcacagacagatccggggaaaaagcgtctttcaatccgttctggacgatatccccggaatcggcgaaaaacgcaaaaaaatgctcttaaaacatttcggatctgtcaaaaagatgaaggaagcaagccttgacgatatcaaaaaagcgggtgtgccggccgcggcggcccagctgctgtttgaaaaattaaaaaaatagtattgtgcttttctgaaaaatctgctagaatgtgaactaatttcataagatcgtgttatatggtgaagatagaggtgcgaacttcaatagtaagcctttggagaatgatggattctgcgaaaaaggctgaaaggggagcgtcgccgaagtgtatcacatcccatcggtgtgattcgctggccttgcattaaataaatgtaaggctgtcaagaattcattttcttggagggctatctcgttgttcataatcaatcgtaatgatatgaaaaagcaatgagagctattcctctcattgctttttttattgtggacaaaacgctcttttctcctcacccgcacgaaccaaaatgtaaagggtggtctagtatgggtcttatcgtacaaaaattcggaggcacttccgtcggctctgccgaaaaaattcaaaatgccgcaaatcgcgccattgctgaaaagcaaaaaggccatgatgtcgtagtcgtcgtttcggcaatgggaaaatcaaccgacgcgctcgttaacctcgcggctgaaatcacatctgaaccaagcagacgcgagatggatatgcttttgtctacgggagagcaggtcacgatttcgcttttggccatggcgcttcaggaaaaaggatatgacgccgtctcttatacgggctggcaggcgggtgtccgcacggaagccgttcacggcaatgcgagaattacggatattgatatcacggcgattcgttcgcagcttgcagaaggcaggattacagtcgttgccggttttcagggcgtaacggaagacggaggcatcacgacgctcggacggggcggttccgatacgacggcggtcgctcttgccgcagcgctggaagcggataaatgcgacatttatacagatgttccgggcgtatttacgacagatccgcggtatgtccggtcagcgagaaaactggcgggaatttcttatgatgaaatgctggagcttgcaaatctgggagcgggtgttcttcacccgcgggcggttgagttcgcgaaaaactaccaagtgcctttagaagtgcggtctagtacggaacatgaagcgggaacattaattgaggaggaatcatcaatggagcagaatttaatcgtcagaggaattgcatttgaagaccagatcacgagggtgtccgttacaggccttgcaagcggattgacaacactttcaacaatcttcaccgcgctggcaaaacgaaacatcaacgttgacattattattcagacacagtcggacgatggggaagcggatatttctttctcagtgaaaacggaagatgccgcgcaaacggtcgccgtgcttgaagaatataaaaacgcgcttgactatgaaaaaattgaaaccgaaagaaaactggcgaaagtctccattgtcgggtcgggcatggtttcaaatcccggcgtcgccgcggacatgtttgccgtactggcggaaaaaaatgtacaagtcaaaatggtgagcacatctgaaataaaagtatcagcggttgtcagcgaaaatgatatggtgaaagcggtcgaagcgcttcatgatgcgtttgagctttctaaacagccgtctgccgtgtaaacgggcaggcaaaaaggcgggacttggagtcaccgccttttttcaattatacagggtctttcatatcccattttacagtcaggacgactttatccgctctcttttttacctgttcataagattctgcaatctgatcgttcatcaattgaatctgttcggctataaaaccggcttcaagctgaaaacaaggctctttctgatgtttgagcctgctggatacgagcggtccttccagttcaaattccagttcttgtttttttgatcctgtgtttgtcaaagttccccagccggctttttcaaaaaaggcggggatttcttcccacgattgaagaggaaatttgcgggcgaggcgttttcccgcccaatacatcatcgatgaatgctccgggccgaggatatccggaagcacgatttcccggattaattcgtagccgtatgcgctgacgtcgagttcagttaaaggttctaaagctgcttcataattattcttcatattatgtattcccctctctccttcgtttattatagcttaaacaggggggaggattacaggatgatcctataaaacacgcgaaaaaatgtgagaaagatatcgcaggaaaataaaattttccctccagataatcaattccgaaaattataatttatgtacacgttttcttgacgcccttttgaggtaggagtaaaatgaaattgtcaataaattttaataaagtgcttacaattgaaacgaagtgggggcagagattttagtacatttcgcacttaaatcaaacagggggtaaagtaatgtctgggaacagagagttttattttcgaagattgcattccttgctcggtgttattccggtcggcatctttttgatccagcatttagtcgtcaaccaatttgccgcaaggggagcggatgcgtttaacaaggcggccggctttatggacagtctgccgttcaggtatgcgttagaaatttttattattttcttacctttaatttatcatgcggtttacggtgtgtacatagcatttactgcgaaaaacaacgctggccactacagttatttcagaaactggatgtttgtgcttcagcgtgtcactggtattctcacccttattttcgtcagctggcatgtgtggcagacgcggattgccgcgcagatgggcgctgaagtcaacttcgatatgatggcgaatattttgagctcgccgtttatgctcggtttttacattgtaggcgttttatcggtcatttttcacttttcaaacggcttatggtcttttgcggtcacatgggggatcacggtcacgccgcgttctcaaagaatttcgacttacgtgacgctgattatatttttagcgctttcatacgtaggtttaaaagcgatttttgcgtttgtgtaagagaactagattactagagggagaggggctatcatgagtcaatcaagcattatcgtagtcggcgggggtcttgccggcctcatggcgacaattaaagcagcggaatcaggcacggccgttaaattgttttccatcgttccggtcaaacgctctcactcggtctgcgcgcagggcgggataaacggagctgtcaacacaaaaggggaaggagactctccgtttgagcattttgatgacacggtatacggaggcgactttttggcaaaccagcctcctgtaaaagcgatgtgtgaagcggcgccgtccattatccacttattggaccgcatgggggttatgtttaacagaacgccggaagggctcttggacttccgccgtttcgggggtacacagcatcacagaaccgcatacgcgggagcgacgacgggtcagcagcttctttacgcactggacgagcaggtgcgcagatatgaagtggcgggtctcgtcacaaaatatgaaggctgggaattcctcggcgccgttcttgacgatgagcgcacgtgccgcggtatcgtagcccaaaatctgaccaatatgcaaatcgagtcattccgttctgacgccgttattatggcgacgggaggtcccggaatcgtattcggaaaatcaacaaacagcatgatcaacacgggatctgccgcatcaatcgtctatcagcagggcgcttattatgcaaacggcgaatttatccaaattcacccgacagcaatcccgggggacgataaactgcgtctgatgagtgaatcggcgcgcggcgagggcggaagagtctggacgtataaagacggaaaaccttggtacttccttgaggaaaaatatccggcttacggaaacctcgtgccgcgggatattgcgacacgtgaaatctttgacgtgtgcgtgaatcagaaactcggcatcaacggagaaaacatggtgtatctcgatctgtcgcacaaagatccgaaagagcttgacgttaagcttggcggcattatcgaaatctatgaaaaattcatgggcgatgacccgcgcaagcttccgatgaaaattttccctgccgttcactattcaatgggcggactgtgggttgattatgatcagatgacaagcatccgcggactgttcgcagcgggtgaatgtgattattcaatgcacggaggaaaccgtttaggggcgaactctctgctttccgccatctacggaggaatggtggccggaccgaatgcggtgaaatatgtttccggacttgaaacatcagcggaagacctgtcttcttcattatttgattcctatgtgaaaaaagaagaagaaaaatgggccgatatcatgaagatggacggcgacgaaaatgcctacgtgcttcaccgtgagctcggagaatggatgacggccaacgtcacggtggtccgccacaacgacaagcttttgaaaacggatgacaagatccaagagctgatggaacgctttaagaaaatcaatatcaacgatacgacaaaatggagcaaccaaggcgcgatgttcacccgccagttctccaatatgcttcagcttgccagagtcatcacgctcggcgcatataaccgaaatgaaagccggggagcgcactataaaccggatttccctgaaagaaatgacgatgagtggctcaaaacgacgatggctaaacatgccggtccgtttgaagctccggaatttgaatatcaggatgtcgatgtatcactgattgcgccccgtaaacgcgactactcgaagaagaaggtggcgaaataatcatgagtgagaaaaagatacggtttatcattacacgtcaggatacgcccgaaagcgcgccatacgatgaagaattcgaaatcaattaccgcccgaatctgaacgtgatttccgccctgatggaaatccgcagaaatcccgtgaatgcaaaaggagagaaaaccactccggtcgcatgggacatgaactgtcttgaagaagtatgcggcgcctgctccatggtcatcaacgggagaccgcgccagtcatgtacggcgctgattgataagctggaacagccgatccgtctgaagccgatgaaaacattcccggttgtccgtgaccttcaggttgaccgcagcagaatgtttgattcactgaaaaaagtgaaagcatgggtgccgattgacggaacttacgatttggggccggggccgagaatgccggaaaaacgccgccagtgggcatatgaattatctaaatgcatgacatgcggcgtctgcctcgaagcctgcccgaacgtcaacagcaagtcgaaattcatggggcctgccccgatgtcgcaagtccgtctgtttaacgcccatccgacgggcgcgatgaacaaagcagaacgtttagaagcgttaatgacagacggcggcctcggagattgcgggaattcacaaaactgtgttcaatcctgcccgaaaggcattccgcttacgacttcaatcgccgctttgaacagagataccaatttacaagcattccgtaatttcttcggaagcgacagagtataagaaagagaaaaagagcctcttccgcacgggagaggtttttttataaggagctgaaggtgatgaaacagccgcaatatattgatatcccgtttgaagaatggagacagtcgttttctttctttactgaagtatcggttcgtttttcagaaacggatatgttcggccatatgaataatgtaacccctttcatctattttgaagaagcgcggatcgcttattttaaacagcgaggcataacggcgcaaaactcggaaacgatgacggtcgtcgcaagccagcagtgcgactatatgcgtcaggtgatgccgtatgaaaatctgcggatttatgtgaaagcaagcgctgtcggaaatgcgtccgtcacccttcattaccttggagaaaatgagtcgggcctgccgtgctttacaggttccgtcgtcatggttcaagtgtcgaagaaaagcggcaaagcggtcagctggacggagcgggagaaaggcattctgctcgcctgaacggataactatttctctaagagacgtcacctccgaagcgccttttacatatgatatcttgactatataaacccattcgtttcagattcgctctcaccttagcaaggagggttacaatacttgaaggagaaagattttcaatcaaagccgctgctgaccaaaagagaaagagaagtattcgaattgctcgttcaagacaagacaacaaaggaaattgcaagcgagctatttatcagtgaaaaaactgtacggaatcacatttcaaatgagatgcatacctgttgcaaacaaagagccttttcaggctctttgttaaataatgagtgccattttataaaaacaatgctggacatgcaggaaggggaataaacgttcggttattaaccagaaaataaaagcccatttgggcttttatttattacactgcagctgttggagaatacaatgttttttgagctaatgcataatattctttaattgctttttctctgttgtatatttctgaactttgtccattgacatttgaagttagtcgaagtaatttattctctttattaaaaaagtaagtgaaagttgctatttcatctttgtcaattttacatttgctggttccgataataaaatcatcctcagttttaaaatcgactgaaatataatttggtaatttaacgttctcgagtaactcataaggagttagctttggtccgtgtatttcatcgtaaagatgttcaattatactcatttgttaagacacctctttactttaaatttttggtgattatatttcttaagtgagcatctaactttttaacaaaatcaataccacgatcatagtcgtctaattcccattcgcttcttgccgcaccaatatgatctcttaatgatatattaaagtaaaacccgagtaaagccccattttctttacattgtcggtataaaaatgtatatttatttggaagtaagaacttattttttattagttcatcattctcgagttctaaattaaaatcaactaataattgagggataagctcctctcttattaattggtcaatctcttgttttttattttttaaaaataaatcaggtcgtaaataacgttccttatcttgcgataccaggctttgttggtaaaaggctttggctttttcttcagaaacatttaataatttttgaagttcttcaatcttttttctttcttcaatttgtttttcttttcggatttttaataattcactttcaataaaagagtccttttcagtcttaaattcctcggactcttttacgaaaccaaaagaaacattcttaggtccacggtctgttggttcaattggatagtctgtctttatttcttttataatatcccttttctttatttcttttttataaaaatcccaaagtttatctagaccgagttctttatgatggatagctactgcaatattatcttcttcattaacagttccatttacatcattatctgataaagaacgtaataccctgccaataaattgtgcataagggagcagtgttttgaaaggtctaaatatcgcggctatagacaaaaatttgtgatcatagccttctcctaacatggctacattgataacaacgtccacttcgtgtttttcaattttctgaaattctttttctctgtcacttttttctaattcactatgtacaatagaacataaataaccctgttcttcgtacaatttttttatttgctcggcatgccaaatactgcatgccacagcaatgattttgtgtgggtgattagttttttcttttttttcttctaagtaatgaattgactgagaaataatgcttttattactatctggggacagggcaactgatcttaatatccaatcttcgtcctttattcccatctttcttatttcctcaagtgtatatgtcttctcatcatttttatccaatgttaaataaactttatcaggaatgtaatcaattttttcaaggctttttacatatcctttagccattgcttttccaagactgtatgtataaacctcttgtccttggatttttcttccgtcacttctgaaaggagttcctgtaactttaagcactttagcgttattgaaatattctaaagcctttttccaggtttttgcttccgagtgatgagcctcatctataataatcaagtcaaaaaagtctttggaaacccgtcttattagagaagaatgcagtctttcttgtaatttatgaatgtttaatattacaatatcagcttggtttaaaatctcttcagttagtgttttatcatattctataactgaaggtaattcagtatagttttcaaaaattcttgtgaagagccaaaaatttttagagtacgccggatcaagtgaaccaagaacagcatctcttataacagtttgaggagttataattaatacctttccattagaaatttcatatggtgcgattcccataaggcctgtcttaccagtaccagtaggtaaaaccacaagagcatgttcagtactttgttttatcagaaaatgctctttcagtttttcataggcttgaatttgtggctctcttaagtaactattctctgatatatttggatttgctgttttaaagtaagacatattttcccccatcaatttaaatttccaacttaatacaatgttattataaacaacttatagaggctattgtactaattcgacaaaacaagacaatttttgtattaaatcatgtttaaagaaagaaattagtgatataacagggtttcatatatcaaaccagtggcaaaaaaagagcctgttttatatgatcagcctggctttgtttaagtacatatttaagcggagatacgcaaatgattcaggcactttgaatatgtcggcaatgacttgcgccgcgaagtattgattatgagggatttcaatttgccgaagcatgaatgtaggaatgcagaaatgatatgcaaaataattcgcctgacactctaaatattccttccaataaatcggcatgatcttatcgttatttacatgtcttaactcgtggcagacctcatgagaaaaatcaagccattgttcttttctggactttcgggaatctaaagagatggtgaacattccattaaagcgcagcgcaaaacttgttaccggattgtatacgattaaaatatccagcgcatgagcgatatgatcaaaattaatgtcatatggatggagaatgtttatttctctatatagcctttcaatccaatcttccagatgactttgtgtgtataccaagatgaacgcccccttaaattgtggaaattaaaatgtgtacaatcttcctatggtaaacgtgactaaaagcctattgaaaattaaattgcaaacgtatgttctattttaagtgaaaaagaaaagcccccgcaagagggcattttttatttttcatcctttttcttcgcatcctcaaagctaagaatgttgaaatcgatccttttttctgttccgagctcatcaaatgttttggaatcggtcggagccggaataaccatttttatatttttaatatcctttgaattatcctttaaaacccaccatgtctgatcttctttctttacttttcctaaaaagtctccgcctacttcgcccattaagcccatatcagtctcgacttgttcgcctgtatttgttacgatgacagattgattcggatggaatgtaatatcctttgaagaagtgttttcggccttcaattccattacaactgatcgtaccttgtcttgatcattaaaataaagggacttggcgtcttccgttggcgtaatctccaacactctgacgctttcgatatacagtttcatatcacccattttaacaggcttcagcggtgtgtcttttccgtcaatacctacttcatcgctatacccgatgccaatagtctttacatgccctaatccttcaatatcgccttcgcctgttttttggaatttgtctctaattgcagcgtctttttttgcttgctcttttttcttatcgactttttccactacaacggctttgactttaggcatggacgtgcctgattcacggccctcgtatgtaccatagattttcacagtatcttgcagtttgaatttgtctgagcttttattgctaacagtataagcctctgaaccatcactgtttttgctcacagtaaacgctacattcttcgaaactgtcttcccgtcatcatccacgttatctgcatatgttacgtcaccttcaataacaatcttggtgcccttttttattccagcgctatttacttgagcgtaatcatatggctttgcatctttttttaactgatcttctaaagaaagtgactttgttttgttcgaagagtcatcccctttagaagatgttgagtcagagttgcatgcagctaaagaaaaacttaatgttaaagccccaatacctaacaaccattttttcaaagcaattttccccttttttgtagaaatgaatacactttatttatatcggcagaagccgaaattttttattgtcttctctgtataaaagcggcaattctctctctatataagcgctttttaatgcgatttaacaccgtgttttcctctgatttttttggtactactctggtataccattgggacacgggaggaacacgattgggatacggggtatttcgcgaacccttgataaacgtaggtttatacgcttgtaatatttaacattgggacacggattgtattacattagtttccattcgtttttgttgggtttcttctattagataactaaataactaaagataactaaaataacaaagacgtcgttttttgataaacaaaagatcggtttatcaaggtgatgaaattatgtaattatttgtgtcactacagactaaaaaaaatcaactttcatcagttggcttgtctgggttatatttgttgttgcgaatatcccccggtttgcggcctgcctctaattgctgcgcaattatcttctgtgctgcctttaggatagaatcagtgatcttaccatcagcagcggcaattaatgtgtcagggtcctctaaaatcttccgagcctcatcttcaaagactttctttttcatttctgggggctcgtctctgagaaggtaatctgttgtaacctcataataatcagcgagcttaatcagggtttcataatcaggctggcgcttatcctgctcatacatagcataagttgtcctagccactcctatatttttagcgacttcttcttgcttaatttccctattaagttttgagctctttgacttgcggagttcttttaatcgcacaccaagcataataaacgctcctttcctgattattataacgtcacagattgtgacaaataaactttatttcacaaaatgtgtattaagtactttacaagtcgcggaatgtgtattattatatgaatacacgatatgtgacgcggaggtgataacatgagaaataaaaataaacgtcaatggttacaaaagtttagacaagaagccaatttgacacaaaaagaagttgcggaaaaagcaaatattgcacggacaacctatgcaatgattgaatcaggagcacgcaacccaacaccgcaagttgctaaaggtattgcaggcgtgcttgattttagctggacatatttttttgaggattcatgtcacgaattgtgtatttcgaagacgcattctgcttaataccttgggtagtccatctgtccaacatgaatacactgtcgtgaggtgagcgcaatggctaaacaaacaaagactaaaacaacgaacatcaaaatcggcaaagagtattacggaacaatggacagagaagaatgtttccgtaaagctctggaaccttatttcacttcaaaaaaagacctgaagttaaacgcttaaaattttctgcttcacctttttttggtggacaagcaaaggaggccacaacaacatgaatcaactgcaaaacttctcccatcaacagtttggagaactgccaatcattcgaattaacaacaaagactatttcggcgcaactgaagcggctgaggcactcggctacgcaaatccacatgacgccatatcaaaacattgcttggaaagtggggtcgcgtttcacgaggtcaccgattcaatggatcggacacaacagaaaaaatttatcaacgaaggaaatttgtatcggctaatcgtgaaatcaaggcttcccgccgcaactcagttcgaatcatgggtgtttgatgacttgttaccaacattacgcaaaacaggccagtacggcggcccgagagtgttatccgatgaagaacagcgaatcgaatcgctaaaactcactttaagtacagcagaacaacaaaaaaaaatgcaaaaagtgttgttccatcatgaaaaacagatcggtgagctcagtcaaaaagtggacgagcagatcactttggattccggagaacagcgccggtttcaaaaagtagtcgcgcgccgggtttatagcatcacggaaggtaaggaagaagcggccaggcttttcagagaaatacaccgtgagataaaagaccggttcggcgttgcaagctacaaagacataaagcgcggggaactgttatccgcaatcaaatatatagaaaattggattcctcgaaaggtttcctaaagcctttcgagttccttcattaattaaattttaacagcgaaaactaaatatatcagggggcgaacatatgtcgaacaatccatacaatatggacaatttatccacccttcttagaatcgagcggcaaagggccaagctatcacagtaccagatggggaagatcatcgggaaaagaaatcaatcgtttatttccaacgttgagaacggtgtttttcctttaacacctgaattgtgtatcaagtggtttgaagcgtgcggcgcatacgaacatattgatctcgtacattacctgttccggctgcatccgacagcggcggcgccaattgacccggctcttaacgagagcgcaagcgcggcggtaattaacatgatccatcagcttgaagaagcattgcaagcaacacggcagttatcgcgctggctggcgaacgataggccgggccgacagtcggaagaactgccaatggctgatattaagcagattttcgatcttattccggcgaacaaaactttgatatattctctggtccgcagtcatggtttgaacatgaaggacctggccgacaggtggacgcgtaaggcgctcatgagtcaggttgcaatggcaaaacaagagggaaggcaggcggtgctggtgtgattgatgacaaagtgctggttaagcgacgtaacgcggccaaattagaaatgatagtgattgaagaatattcgaaaattctcggcaaatctttgataagcggtgaccttgaacaagcagataaagcatatgcgaggatgcagcaagcaagcgcgagactggaagattataaggccgaaaaaagagagtttcttcggatggtacaaccagttaagtatatgagtcctgcaactgctcaggaatttcaaaggaggtttttggttgatgcagcatattgaaaatccgatggttctgaacaactggcatgacaaggtgactgaaccggaaacaaaaaaggactttttcggggacgaagtaacgtcagcagataattatgtaatcgactgcggcgagataattctacaagacaatcttaaacgctacttaaaggagcaacttggatttaaatttcattcagcacaataaaaaaagcccactttgcagagtggacttcaaaaggtcttttggtaaagaaatgttcctttaattatacctaattacctgtctaaaaacaattagaaatcgggggagataacaatgatcaaattaaaccttgaaaacaatatcggtaaaaaagcgaattttgaagctgacagtttaacagctcgggaagcaagctcaattatccatcaaattattacttacatgaatgccgatgaaatgcctggccgcatccgtcccgaacaaatatctacggcagcctgtcaaacagcagagtctattactgctattcctcaaaaggatgacgtagaaaaaaacaccgataaggcaggcgcggcagatgcgagagaggcaacaaaaacagtgacaaatcggcttgctgaaaaagctgaacctgccgaaaaaatcaattcaagaccaagacaggttcaattgttgaacagtgaacgccgtttggcgacgccaattgttttccctacaaacgaaaagggggagcgtgaaaagtggaaaacaagattttcgtgcccttcatgtggattaagtgaaacaaaacacgtcccccaaggattccgttttacaccatgtgataactgcggaacgcgtgttcaaatcaaacctgcaaacgatgcgtgggggcaggaagattcagagggattcgtatacagagccaataacttctatgaagaaaaaaaagagggaagatacgatgcctaaaccagtaacagcatctttcagtgaccgagcggacgatcagaagcgtttgagacaagtcggcggctcgatcatgttcagtaaaggcaaacccgtattttctttcccatcaatggccgcataccgagaatggcagcaacttggtgcggaagcatacaagagaagggtggggctgctctgatgcaggctgagatatttgcaaaaactgcagatatgagccgtgaagaatggctaatggaaagacggaagggcatcggtggttctgatgcctccgtaatcctggggttaaacaaatggagaaccgcattcgaattatggctggacaaaacgggacaagtcccggtcagtgaatcggccagcgaggcggcttacttcggctcaatccttgaggacattgtcgcaaaagaatttgaagtacggagcgggaaaaaagttaggcgtaaaaagtccatgctgaagcatcctgaacatgatttcattttggcgaatgttgaccgaatgatcgttggagaaaaggccattctggaatgtaagaccacatcggaatacaacttgaaagaatgggaaaatgacgagatccctgctgactatattgttcaggtccagcactatcttggagtgcttggtcccgagtataaaaaagcatactttgctgttctgatcggtggcaataaattcgtctggaaagaaattgagcgggatgatgaattaatcgaaatgatattcactgctgaagtcgagttttggaatgctgcggtattgggtggggttgctcctgcgttggacggatcaagcgcagcagaagaatatctgaaaaaacggtatgcggaaacggaaagcaacaaggttattgatcttaccgcggtaaaccgtgaacggataaagcagtatttgcaattaaaggaaagtatcgctgaattgcaattgcaggcgaaagaattagaaaaccaaatcaaacacgaaatgaaggaagcggaatacggattcattggcaactatcaagctagttggaaaccggttgtatctaaccggatcgacaccaataaactgaaagagcagtttccagatgtatatgagaaagtcacaaaagaagtgcaatacagacgctttggaattaaggaggttagctaaatatggctacaaatgaatcacttaaaaataacattcaaaaacaaaataacgtgccagggcagccgcagggaacaacgatgaagggcctgctttcttcacctgctgtaatcaatcggtttgaaacggtcttagggaaaagggcgccccagttcactgcatccattctgagtctgtacacaagcgagaagatgcttcagaaggcagagccaatgtctgttatctctgcggctatggtggcggcaacgcttgatctaccggttgataaaaatttaggctatgcgtggatagttccgtatagcggtaaagcacaattccagcttggatacaaagggtatatccagcttgcgttgcggacaggccaatacaaatctattaactgcatagcaattcacgagggtgagcttcagaagtggaatccgttaacagaagaaatcgaaattgattttgaaaagcgagcatcagagaaagtggatggctacgctgcctacttcgaattactgaacggtttcagcaaaacggtctactggacaaaagcgcaagtagagaaacacaaaaagaaattcagtaaatcagattttggatggggtaaggattgggatgcaatggcgcttaaaacagttctgaaatctatgcttagtaagtgggggattctctcagttgaaatgcagaaggcagttatcgaggatgatgaggaacgtgagcgggttgatattactgacgaaatggcagagccggaaatcatcgacgctgaagtgtcagaagaaaagccaagcgcgcaggatgtcgatccctttgacggtaagcctgtagacattagcgaaaatgacctgccatttgattgaggttagcatacccttctgttacaagtggatgacagaaggggcgcctaaccgggcgcaactgttccgagattatgttcagggttatatccgaacaaatgaaccgggcttgcgtttagtccgcatcagcggcatgacagcactgtgtgaaaggaagtaggtgagcggcttggaaatgcaaggcatggggtatgttattcagccccgccagcagtttgcaaataggcgcgaaaagattctttatatgtgtttgctcgaagaggccgttttcgctcccgttggatcattaaaaacaggtgaagcaatgattaatgtggcggagcttgcgagggacctatctattgatcttaaaaaaatgcggtactctctcggcaaacttgagacagcaggattgatcaaaacaagacgaatgaagcagaacaaagcaactattatcacgattgttgattatgagaagcttcaaaacataaagaattacgggaagaaagcagattcatttccgccagtggaaaccggggattcggaacaagaacaaaaaaagggtgaggacatgcaagaccaaggtaaattcaaaaacattcctgattacgctgatcacttaatgccgcaacagatcagcaacgaagacacactaaaggacgctttaagtgcagcagaattaaaaaatatgaatctggcgagtgaaaaagaaattgaaaaattcgctgatatggttattaaaatgggcgcgcttccggaaggcatcaaaaaaggcatacttgttcaatatcttgactgcatccggcttacacgttcgcattgcaaaatttccgcgaagttgcttgcgaaccatattgaaaaaatgagtaagtacagcgtcgatcagcttcattacgctatgtgggagcatgccgagaaatacgacgaccgcaaagaagcgtacacactcggtattctgcggggaacgagtgaccataaagcgcggcagggccttatgaaattaatgaaccggggaggacgaggaaatcatgaacagtttagcaaccgccctaaagcagttggagaaagccaatccacatctagcgcagaagttgaaagactcgaagcgcttgcccgtgaaaagggcctctcaggaaagatacgagacactcactgtgatttctgaggaaaactgcatttataaacaatgcgacggctcagggctcatatgggtgaaggatcacaaagaaaacacggagtttatgaaagagtgcccttgtaaagccattaaggcgctagaaaataaactgctcagcgcccggctaccggaagaatttaaggatgtcactttaaactcttttgaaattgatgtttacgatcaggatatttctaaagaacgggcagccaatgccaaaagggcctcaaaaaactatgtacttaaattcgatatgatgcgcgagcaaggaaaaggactttatttccacagtcatgagaagggcagcgggaaaacgcggcttgctgcaagtatcctaaaggccattataaaaatgcatgataagccggaaagccctatgaagattctttattcatcaactgctgatctaatcggtgaaatcaaaaaaacctttgatggagaatcaaaggtgaaaagctcggacattatcgaggctgttaaaacggctgatcttgccattctggacgatataggcgttgagaaagtcagcgattgggttgaggaaacgttcacacgcatccttgattacagactgcagaataagaaaccgaccatcttcacaagtaatctgagcattgatgaattagaccttaaatatcctggagggcgtatcagtagccggattgagaaaatgacatttccaattcgtatgccagatgaaaaaatcaggagcaaaaaagccaagcaggaaaatgatctactgctccaatcattatacgaataggagattgctatgaaagagaaaacaaacgttacgatatccggcggcatgtatctgttcgggcccgccgagcaaacggccggccaggaccttaccccggcgatccgggtgcttgaggaaaaaatcaaacaaatggagctgatgcacagtgcttaaagcggttatcctgctgccggccatcatcctcacagcgccgtacaaggaaaagcagattcagcactgggaacaaattgacgggaggtaacgacggcacgcgggaacgggtcgataaggaaatagtcagagatatggaggcatcacatgcaaacgaataagtacggcgcaaggaaaacacaggtggacggcatcacgttcgatagccgggccgaagccaaatactatgagcaattgaaatggctcaaggtaagcaagcagatcaaagattttaagctgcagccgcggttcctgcttcaagaggcattcaaaaagaacggtaaaacttttcggaagattgaatatattgcagactttgaggttcataacttggatggcagcatcgagattattgacatcaagggtgtagaaacaaaggaatttaccatcaaacgcaagctgtatgagcggctttacgatacgccactcaaggtgctggcgctggataaggcattcggcctcattgagttggacgagctgaaaaaactcaaaagaaaggcggggaagaccactgcaaaacgtggtaatcgcagacgatcggccgttgtgggtgcaggaagaagataagctcatggcctgcatgcgctctgttccgattacaaatgcgtcagccgcatgggagcagattgcaaaaagcttggaggttcagaaattcccaaaatcaattcaggaggttattgctatgcaagaaaaaatcaatccatataaaccaggaccggttaacgaatggaagatgacaccggaggagctggcggcatacgtcgaaaagcatccaatcatctaccgtgaggaattaaagccatctgccggcgtgacgatgcggttgccgtcgtaaaacgcaaaaaagcaccgaagctgcgcctcagtgcccttgatatgaactggtacttctatcatagcacagggggcggccagagtgaacaagccaacagaaataaaaaatcatgaaacaactattcagcaaagcatcgagccggggaaagtccgcatcatcgttttagatggcactgaagggactgctcatctaatggacgccccggaacacggtaaaacaatcattcaaacaataaaaggcggcctggctcgttgtgattacgagatcggccacaaattcaaatagcaggggtttcccctgtgggggaggaacgggcatgaaagagagaattgagtggttaaaagggcttacgtatattccgcaaaaggaaatggaatggcttcttgaacaagctgaactgactgttaagcagcaggaaatcatcgaggaaaacaagcgtcagcaggaagtcacggtcaatcagtttcggcaggctcaggaagatattaagttgctgcaggcggagaacaggcgttatagaaacgcattagaattttacgccaatgaaacgacgtatacaaacgaatttgaagactgtccgccagctgtcgaactcgacggagggcaaacggccagaaaagcattggagggggctgcggaatgaaagtatggcattcaagctcaacagaaacaaaaccttgtgttttgtgtaataaaaaaactggcacttataaagtttatatgcaatcaaatatttcaattcgactccctctatgtgattgggaggacaggaagtgttatgacaaggttgatgttaaaaatttggctgatatggcgttgcgtttgatcagcaaagaagcaaaagaaggtgttaaaaaatgatgccattacaagtagaacttcaacggaacgtgaaggccacgaaggacgaagcaatgaccgtcgagcaggcggccgagcttttaaaggttcacccggactacatcccgacgcttgtcgctcggtctgacgatctgaaaatgatcggcgatcataccattatcgctaaacgggataaaacaaatatctggctggttggggcatgcgtgggactcttcttcttcactatctccgtgctaccgaatttgatcgggtgacgggatgaaaggtattgaattgttcgcgggcattgggggaatcgctctagcagctgaatgggccggcattgagacagtagcattctgcgagcataaccctttctgccagaaggttttaaataaaaattagtaccgaaaacgggaattacatttttcagttctgctctagatttagcccccagataataatcttgtaaaactgcttggggtgatactgattcgtgatttgtactatggtttgtaggacttgcagcaaaggcaggagcagcagaaacaagtagagcaagggacaatgcagaaccagttaaaacttttttcaatgtcattttaaacactccctttgtttttaaatacaactgtattataacacataaatacccaaggtaattattgttaatattttgtgaacttagttgaaataaagaaatccgcgcagatgcctgttgctctaaatgcggctgcgggcatctgggcgttgaggaggagattataaattgataaaataggatgattaggaaaatattgagttaagggagtgggaagattgaaatggagaaaaatttaagtgaattattaagttattttgaagtgccgagctacgttatttcgctagtaagtatcgctttgtatctgattagggttttacaccccattactcttttttcttcgaatgttgttgagcagaaattgttttcaaaagaacggttgtttttcgtagttgtttgtaaatactttgcttatggattatattttggaatcttattcatttgtatatctatatcatttaataacaggtttggttggacttataatgaagtagtaaatggtgtttcccctatatttatagcattaataatatttttttcattaatagctaacgaaactcgaaacacagaaaatgttttatttaaagcaaggtctaataagattattaaaatactagttttcttgctgtacttgattgctttattcactttttatatcaattctgctttgttgatatattttgctgagtatgagaattcaagatggcaaatatttgcgttattaattttctttttaatttgtgcagctatccctttcatttcgattcctgttataaaattcatgaatggatcaactaaaaaagcggtatatataaaagataaaaataacgagaaatggtttatattacatccaataaacaaggatatcgttttattgggggataacagcgatcccaaaagatgtgaaaaaactatgtttaaaaaaatagaagatatatataatgaaccgatcacactaaaaatagaagataattaagtccaagacggaaagcctgcggacactaaacccacagtatagcgctgtttgtttggcgtccgttttttatttcatgattatctggatatgaatcagatacctataatggaaataaaaaaacggtttatcaatgagctgaatcgctatgctgactccggaaagcggaactacacgtaacattcgaatcagcaaaattcattgtgaagtaagataaattcaaagaagaatcggaggaaaatacaatgctacaattaacaaaagaacaggctgcggcttttgagagcctacggaaaagcgttagcttagggaattggcagggagaatgggccccgttaaacagcgttgatcctgtcgcgcttgcaactgccctcgctaccaacgaatatcaaatattaaagacgcctgccgatgaattcgaagaggcttttgacgcaattcgagaagaggctgaaaccaaaagccccgaggccacaagatacttggatgaagtgaacggtttttgggagcaatataaagagaaagccggcctttaatggtttggtaaccctattgaacccggattatggtaaaatataagcatatgaagagttaaaaatgcgcctgctggcattacgcagccaaggagcttaaaaataaatacgtccaagacggaaagcctgcggacactgatcattgcacagaattttttctgcgctctggttggtgtccgttttttgttatcaggagggatgacatgaagcggaagaaaaaggagccagataaaaacgtttctgagcgatcagatcgcttttggcagcggatgatgggacaaaatatgcaaactctgaaaagaggcaagggcggcgctttaaggcgcaaataaagggagtgtttggtgtgaaatatggattcgcctatcaaaatgggaaaatcgtgaatcttttgtgcggaaaagaagatttatttgagaatatgaaaagtttcttgatggaaaagtgcagcctaacaattcaggaagtaactaaaactgaatatctggcagaacaaaaaaagaacggttggaatgagaaatattctatttacggacaaaaggagagttataatgtctgatcaaatgatggcttgggaaatcgaagaatggattcgtgattataattttatgctgcgggagatcagtcgattgagccgcattctcaacaaggtggagtttgccgggcagaagcttgtggctacttacggtgacgaagcaggaatgccgcggggatcagccggaataagccaggcggaattacgtcagatggatcgtcgtgaaaagcggctccgtaaatatgaaacaatcgttgattttcttgagcgctctactgaagaaatagaggacgaaaaaaaccggattgtctttgattgcatgttagaagggatgaagtttcgtgaaatcgcgttgcatcttggcgtttcccgcgaaacagtcagacgcattaaaaatgatattgtttgccatttgtgccaaatgtgcgaaacgtgtcagcttttgcaattgttgaatcagataaaatccgcagtgtaaactggaaggcaggatggggaggcgaaatattcctgcgtccccaccaatttcatatagtgaacataaagctcttatttcgtatagggctttttatttgtttctaaaaaatgtctcttgtttgccgatacacttcataggtgatgattatgaaatggagtatgattagcaagcacatttttttctggagaagaaaaatagaatataaaaaagcaaaaagtgtaactgtttatttgcaaaaaaattacggaaaggcttataaaaaaaataacggaaaacaggataaattcaaacagaaagttacgaatgaccattctcttgatcaacttattgaaatgtccaatcgtttaaaagcaaatagaaaagttgagggcgatacaagaagtttgatcagtattccttttactattttgttatccgtttgcacggtgacagtaacaatctcaaaagcaatgattgattcaattactaaagacactactgttgtcatgataagtccaaatttatattcagttctcgtatatgccatttgtactttttttattttaatttttgctttttaccaggtaattgagtctactacaagaggaagatcagcaaagtttaatcttattgaggttcttattgatgagtgcattgaaaaaaagaaaaaacattcgaaggaattagcagcgttgaatgaaaaagaatatggtttcatgaacttaaataattatagtgatattaaaattcatgaagtttgcgaaacatcaaaaaaaataattattattaaaaaataatcatcttttaaatttttttgtaatgtgaatgccaccatttatgaagggcgctttcgttcgacaaattttgcaaagtgtggacttattgttgattctttcccatatttaatatagagggggagcgctatgaactttgaaacaaaacatttaattcgttggggaatacctggttggacttttctaggtgcattaacaatttacttctacattaaagaatcagttttgaacagcgccttttcaataagcaagataccagctttcatgtttactgcaatttttgtaggtgttggaatcataatcggacatctaatccatcagataagcatgttatttggctttgtgatatggaacaaatggtctgattactttgaaaaagaattcaagtttgatcagtttattatggaggatgaaaagggtaaagaggtacagcgtatatatagttataggttggggaatgtacatgctttaaggtctcttaatattagccttataatcgcgttagttgcaacggtggttttgagtataacaatgtatttttcatcaaaagttcttttgttgattgtcatcttgtttttattagtggttataacatttattaattatctttatttcaaaaagaatttagaattttttattatgaaaattgaatcaataaacaacaataattaaccgtagtgttcgacaaattctgcaaattgttcctttctcctgctccttaaccgataataaggtggggagggggtgatgaaaatgaagcatcaagagaagtatagactttcaaaaataatacaaaaattaattgatgaggacattgctttaagaaaagtaaccaatactgtatcagaagaatttgaaaaagaaagaaccgaggaattacaagggataattaaacatctagaaaaaagctcaaaccttttaaaagaatctattaaagaaattgaacaaataaccttgaagtaatagtcaccaaagaattagagtatttggagctgaataatttgaaccaaattaatttacttctaagatttttgcttgaagttgctgcactaatctttatcgggttatttgcttggagtcatttcaatggttttttaaaatatgttctaactttagtattgccgatagtagcaatgctaatttggactgtatttgcagtacctaatgatcctagccgaagtggtcaaactgtaatagccgtaaatggagttataagattgattattgaattactgatcttcgcaatagctgttacggcgatttactttagtgatttaaaaacagttagtattatctttttttgtctaataatactacactacatagcttcagttgaacgtataaaatggcttctaaatcaataaagcatagcaccctttatagggtgctttttatgttctctgtaaactgattccggtaaatctcagaaaaacaattggcggttaacggtctgagtgcggcgtcggtttagagagaatatctttttccaaaacaactcaattcaaaaggaggcggcggtggatgtagatggctgaaaagcacattcaggcgtataaggattacgccaaaggcatgaaatacaaggaccttgccgaaaaatacggggtgtcagtaaacaccattaaatcatggaagcagcggcatggttgggaacgaaaaaagggtgcaccctctgaaaaaagtgtgcacacaaaaaaggcaggcgccccacccggcaataaaaatgcattggggaacaacggcggcgccccggagagaaatcgaaatgcggtttcgcatgggtttttctcaaagtatctgccagaagaaacgcttgaaatcatggaagagattcaggagcgttcccctgctgatatgatatgggatcagattcagatacagtatgcggcaattattcgggcgcagcgcattatgtttgtacaggatcaggatgacactacgaaaattgtttctaaaataaaaggtgacctcagcataaatgaggacggcagtctttcaaaagctcactttgtggaagagttgcagcacgatatacaattcgcatgggataagcaggcggcattccttaacgctcaatctcgggcaatgggggagctccggagcttgatcaagcaatttgaccagctggcgcatgagcaagatgagcggcgccttaaattggaacaaatgcgcttgaatatcgagaagaccaagaaggctattaacggcggcgacgaaaacaccaaagaaaatgagattgctacaatgttgagaaaaatggtggatgccgatggaactgaataaaaagcaaaaggaagtttgggacagcttcataaaagagcagcccaaaattttaatttgtagcggcgcaaagagggcaggaaaaacattcgtgctccttttggcgtttcttgctcacgtcagcaagtatcaaaacatgggattgaattttgttattggcggggcgaacctgggaactatcaggcggaacgttctgaatgatttagaacagattctcggcaaggaattgaaactcaataagtcgagcgccgttgagatattcggtaatcaggtatattgctttgacggagcaaacgcaaattcatggaaaaaggcgcgggggttcacgtcagccggcgcgtttctgaatgaggcgaccgccctgcatgattcatttgtaaaagaagtcatttcccggtgctcttacaaaggcgctgtggtcatgatggatacaaaccccgaaaacccgatgcacaccgtcaaaaccgattatatcgacaaagacgggcaaaagttgaagagcggccggctgaacatccgatcatttcatttctcgctgttcgataacaattttcttgatccggagtatgtggagagtatcgtggcatcaacaccgagcggtatgtttactgatcgggatataaacggatattgggtggcgtctgaaggagtcatttaccgggacttcaataaggacattcactatatcagttctgaggaattggagaacaggcgcgtcaacttcaagaagtatttcgccggcgttgactggggatatgagcacccgggttctattgtcgtaatcgggcaagatgaccaagggtgtttttatttgctcgaagaacatgccaagcagcatgaggaaattgactactgggtgaaagtagcgaaaggcgtaaaagagcggtacggcaatattaatttctactgcgattctgcgcggccagagcatgtgcagcgcttcaggcgggagaagttgcgagccttgaacgctgataaggcgatcgtatccggtattgaagaagtggcccggctgtttaagcgaaatgaattattcatcgtgaaagacaaggttgagcgcttcaaaaaagaaattttcatgtatgtatggaatcccaagaccggcgaccctgtgaaggaatgggacgacgtgctggatgctctccggtacgctctgtatacccacaacaagccgaaactcagaaagggggagtaaccaatgaaggaatatataaatctaattcgtcagagtggaatcaacggcgacattatcaagatgatgattaatgaacacgtccctgtccgtgaaaaattgatgaagctatatgcaagatataaggctgatccggcaggcgttcccatattaacacggtccatcattgattatggcagcgcgggaaccgataaggtgcagcgtattgatgacaaggtaaacaataagctgaacaactcatttgactctgaaatcattgataccaagacaggctatatgtttggacatcccatttcttatgaaaccgaagataagcaattaaaagatcaagtgagcaccttcaatacgagaaataacattgaggacgccgattccgaactcgggaaaatggcttccatctgcggttacggcgcccgcctgctgtttgttaatgaagacggaaacgaatgcctgcgaaacgttgatccgtgggaatgcattattctcgctttagacgatataacagagcccacatatgctttgcggtattattcagtgtttgagtgggcgagcggcaaaaaagtcgagtcatatcgggctgatttctacgatgaaacgttcatttattcgtttaagtcgtctgataaaacgaagtacgatcttattgagacgaagccgcatcttttcaatggatgcccgttgtttggtgttccgaacaataaagaaatgaaaggcgacactgaaaaagtcatttcgttaattgatgcatacgacagaactttgtctgacgcatcgaacgaaatcgaacagttccggcttgcatacttgattgtcaaaggtgcttcactcgatgatgaggatatggaaaagctaaaaaagaatggtgtgtttgaagtcttcgacgataacggtgacgtgaaatttttaaccaaggaaataaacgacgccatgattgaaaatcacttgaaccggctggaagaaaatattttacgatttgcgaagacggtcaatttttctgacggctctttcgggggcactattacaggcgttgccatgcggtataagcttatggcgttggaacacaaggcaattaccatggaacgcaaaatgacagcggcattccggtatcagtataaaatactgtgctcggcatggtccaaaaggatactggccgacaaagacgcttatctgaaactatggtttcaattcaagcggaatcttcctgcaaacattctcgaagaggctcaagcatccgcggaactcaaagggctggtaagcgaagaaacgcggcttgctctattatcgttcattgatgatgtgcgttttgagattgaaagaatgagagcggaagaagatgcttacacaattgatgataatcaggatgacgatgaggaacaggaggtgaatgaggatgatgaagcttttcaaaaggacgaaagaaaaaaacagccgtctgaatgaagagtttaggattaattctttgttgagtatgctggaaaacgaaaacctgctgcatgaatctgaagaaatatatgctgaagtgaaaaagtctctgtttctaaacaggaagaaacataacgtttctgactaattgagcagcaagctactcttttgagtggcttttttttatgcctttttttcgcgttgtaggcgttaaagagcaaccgaaatacttttgaacttgttaggggcttcggcaactgataagggcaaggaggacacacagaaatgaaacgattaaacacggataagtcagtcagtccgtcaatgaatttcatgaaaaaagaaaggctaccactgcgcattaaccttcagcatttttccgaacctgggggcgcggctgatccaacaccgggagcccagccagcaggcggaaccggtaccgatccggcaccgcagccgagcggcggagaactctcgctggatgcagtacgggctttcctagaaacaaatgacgagggaaataagctgcttcaatcaacatccgatgcaagggtgacagaagcgatcaagacgtatgagaaaaatacgttgccgaagaaacttgaggaagagatttcaaagcggtttcctcctgaaacagaggaacaaaagcaattacgtgagttgcaggaaaaattccagaaccttgagcaagagaaaacgcgggagtcgttgagaaatacggccctttcaattgcaacggaaaagggcttgcctactaatcttgttgacttttttatcggtcaggacgatgcgaccacagaacaaaatttgaataccttggccgaagccttcaagacttttgaacaaagcatcgtaaacgatcatttcaaaaagaacggtagcacgccgacaccatcaggcggagcatcagccccgttaacagaagaagacattaaaaagatgagtgccgaggaagtcaatcaaaactgggatcgaatccaagctctttataagaatcaataggaggataaaaacacatggcattagataattttattccggtattatggagtgcaagactgctgagcaatttacaaagaactttggtttatggtcaaacgggagtcattaacagagattacgagggagaaatcactgctgctggtgactctgtgacaatcaacaatatggggcgcgttagtgtgggcgactacactaaaaatcaagacatggataacgcgcaaacacttgattctacaagccgtaagcttctcattgaccagtcaaaatatttcaactttcagattgatgacgttgataaaattcaacaaaatccaaagttgatggacgcggctatgcaagaggcagcatacgctctgaaaaatactgctgattcatatattgcttctcattatgtggatgcagctcatacgatcggcagcgatacaaaagttgtttcaccaacaaaaaacgacgcgtacgaatatctggttgatctttcggtgaaattggatgaagcagacgtgccggaacaggggcgctgggtagttgtaacgccttggtatgaaggattaatgctaaaagatgaccgttttgtaaaggccgggaacatgtcttcagaacaacgccttttaaatggtgttatcggacaagcggccggattcacggtattaaaatcaaacaatgctccactttctaaaccagagggtggcacagaaaatcataagattattgctggtcatggcatggcgtggtcttatgcagaccaagcaacccaagtcgaggcgtatcgccctgagaaacgttttgctgatgcagtaaaagggcttcacttgtacggcgccaaagtaacaagaccggaagcgctcgcggtattaagcgcagcccgtccacaataggaggggcttttttatgtggattcaaaatactgataccggttcaacttggtttgttgaggatgaacacggtaataagcttttgaaagaggacagatacaaaaaagtacagtcgcccattaaaaaagctgaaaaaaacagcaaaaaggcagcggacaaaacaacagatgaagagaatcaagaatctgctgacgctggtgaaaaagcatctgacgaataggggggatagcggtggatatagaacaaactgaaaaagagcttttgaagccgttaacccgtaaaatgcaggagtttttacggaagctgaagcggctttttcgtgggacttccgaaaaaatactttccaaattgactgccctgtttgtcaagcttgataaagggcgcgaaatcagccttgctgacgcgaatcggagtaatgatctttctcagattaagaaggatatagcatcattgattactgccctttctgcaaaggttaaaacggctgttcttgattttctgactgaaacctatgagtcatcgtataactggctcatgcttggtatcttatcggccgtcggctttaaattgtcccgttcatcgaaagggaaattgcctgtcgcatgggcggcgcccgcgtcaatctcgcagactatcacaagtgaaaatatgctcaaagcaatcgaaacggaccgtaaaaagacagttcagaagatcaatcatacgattgaacgcggctttattgagcggaaacgctttgttcaggtagcgaaggaactgcaagctgatgtgggtgtcagttataaccgtgcgcagcgcattgtcagaacagaaatgcatcgagtgcgggagaaagctacactggacgcagctacgaaagctgattccaatggtattgccatgaaaaagatatggcacaacatgggtgacgagcgggttcgtgagggaagaaacgcggatcatgttcatttagaaggccaggccaggtttgtaaatgagctgtttgacctcggtcaagataaaaacggcaagtctgtgagggcgccggcaccgggacaaagcggagatccttcaaatgatataaattgcaggtgcttcgcgacatatgaacccgtgctttgaaaggactgagagaaatggacctgtcagaattaaaaatacgattgggaatccccgaggatgacacctcgcaggatgcaaagctacaaattgaccttgaagacgcaatttcttttgttaaggaggattgcaataactcttttgtggggccggatggagttgaattattaccgggccccgtgaaaaaaggaattgccctcatgattgaaatagaccgggatagcccgaaaggcgtccaggctgaatcaattggcggaatgagcaagacatacacggcggatgacgtaaggtataaacccgcgtttgatcttttccggccatacaaaaaaattcgttttaaaccattgaggtgatcagatggggcgccgaaatatccgggtgagggatacaaaccgtataccggaattactgaggaaccttgagccaaaagggaaaatgaaagtcggtgttctggacggcgaccgccaaatgatcgcggctgttcatgaattcggctgccgtattgctgtaactgatcgcatgcggaattatcttgctgccaaaggtctttatctcaagaaggatacacagtttattaatatccctgaacggtcattcttaagggctggttgggatgaaaatgaagccgagattgtacaaaaggtagaggaactggtcaacagagccatagagaacggcgattctattaatgacatcatgaacgcggtcggattgctggcaaagggccggctgcagacgtatgcaagagacttacggagccctgccaatcatccttttacaacggaggaaaaaggctcttcaaatccgttagtagataccggggaaatgatcggttctatggattacgaggttgaaagctaatgaaaaatcactttcagttcggtgatctgattgagaaatacagcgttgattttacattgttgctcccggcgtctgaggggttttatgacgatctcggaaaatgggtagagggcaagccggtggaatcggaagaaaaaggcgctattgtcccattacaggcgcaattaatttatcaatctggcggacggcttacgcagatggacaggcaactgtacttccagaagaaaatccctttcaaggctcaagtggtttttgatggagtaacctttttggtggaagcaatgacgccatacgggacatacgccgatttcaattcctatatcttaaaggcggtgagcaattcagatggattacaacagcataatcagaacggttctcagaatgattaaagagaaaaccggccatgtcgttatcgaagcaaacgggacaggtaaacagcctgaataccctttttgcacgtataccgttacttctccgtatttgccgcaacacaggggtgttgaggaacaaggagtgttaacggaagacattgagctggttttttcttttacatggatttcaaatagtcacattgaagtcatttctcttgctcaagaaacagcctcttacttcaaaactgctgacgcgcgccagacgcttcatgacaacggcttggcgtgggtgagaaacgacggtttcggtaatcgggatacatttatcacgatagacacagaacgccgtcacggctttgatatgcgtcttagaacgcgagcggcttatggagagacacaagcggagttttttgattccgcacaaatagaaaccataggaggttaaacacatgccacttagtgatgtaacggtcaaaatcgacctggtgaaaccgtcgaatcttaaaggattaggaacacccctaattcttgcgaaggttgccggacacaacacctataaagaatatggctcaatagaagctgtcaaagcggattacccagaaggaacacccgcatataaaaaggctgctgctatttatgcacagggcgacaatgccccgtcaaaagtagccatcggtacttacggaggtaaccccgagaacggggagagcgacggagcgggagcggctgccacatttacgattcggaatgcttttgacgagtattttgataatgattggcacttcctcattcttgctgatgcgacggcagacgagaagctggaagcagcaaaggcgatggaagaaaaatcatacaaattcctcgttctgcaagtaacagatcgggaagaagtcacttcttataccgggaaggaccggacaatcgttttttatcacccgataacaagcgagcatccggacgccgggctggttggtgccgtcggctccctgacagtaggttcagttacttggaagttcaaaaacattgtgggcgtcaccccgcaagacctgaaagcggacgagctgcaaaagctccacaaagagggagctatcgcttatgtgaccaaagcaggccacagcgagacgtcagagggaattactgcttcaggtgagtacattgacgtcctgcacggcaaggactgggtgaaattaaatattgaaacatccattcaatcggcattctcaaataacggtaaaatcccgttctcgaatgccggtttttcattgttgagtgttcaggttacgaatgtacttcaaaaagccttttcaaatgggattgtcgcttctgatgaagacggcttgcccgtttacaccgtcagcacaaaaaaacgctctgaagtatcagacgagaacagaaaaaatcgcgtgtatgacggcctttctttcacgttcgaattagccggcgcggttcattccgcctccattacaggcgaaatttcaatctaaagggggagaatagtcaatggctgcttatgtttatgatgcgaacgaggtcaacacgaatatcgacggaaaaattgttactggttattcagagggtaccatggtttcgtgtgcaaaagacgaagaaaagttttcaacaaaagtcagcgctaaaggtgatgtgagtgttgcaacaaaaaacaatccgctaggtacaattacgcttactctgtccatgggttcgccgtttgtgccttatttaaatggattggcgaacacgtccaaaaaatttcccatctgggtaactggcggacaagagaaaatcggcggcactgaagctatggtaaaaaagcctgctgatgcagaattcagtgacgaaatcggagatcgtgaatttgaaattcaagttttcgattatacagttttagatcagtaaggtattaatcatgtcgaaaagaaaaaaatcaaatgcaaaaaagcagtccactagggctgcttttcaatatatgcaaaccaaacaatcggagggaaaacctatgtcaaaattcggtaaacaaaaaacagttaaaatccaaggaatcgagtacactcttcagcacccaggaacaagacggatggtagaaattcaagatgaagcaattaacattaatacaggccgcccaacttcttcacaattgtatgagctgtacatgaaagaagttgtggtaaatccgaaagtaaacttcgaatacttcgatgaacatgctggattcaatgaattaatgtatgaggtttctacctttcttagcgatgaaaccgtcgaaaccaaagcagttttacaaaaagagggcgagtgacaactggcccatgtatcggcttgtgatgtctgagaagttttctttcacagaggttgcagcaatggacctcgatacattactcgaagccaatgcggctttggacattcatctggccgaagaaaacaaacgaaacaaaaagaaataaggggggttaaacgttgacagacgccttgcggagtacgcatattgatgtggaattaaacgttgatacctcccctcttgaacgagccaaccgccagattgatagacttgttgatcatacggataatgcggccggccatttttctcaaatgcgaacgcaaatgtccaacatgcacagggagcagcgaaggttcaggaacatgagtatgattctggacagttcttctttacaaactgctgcgcggacaattgagaatctcggccccgcatttgaccttatgacgtctcatgtggaaagcctaaaccggaccattcaacaaacgaacagattagtgcaaaatataccgtcacgcgtgagcatcgacgttgaccaatcatcattgaacaatgcaaatgatcaagttgataggctgcgaaacaatttgcaaaatgtggacatgcgccgggttaatgggggatcatcacaaaccgcggcggccatgcctgcacctgattacaggggtatgcgttattacgggcgggaaatggactttttgcgcggctctacacgcggacttgaagcagatactattcaaatggtcaatgaaatgcgccgggcttggtatgaggaaagatacggaatgaacggtttccgtaatgagcttatacgggcaagatatggcttctttcagttaggccaagaaatggacaactggaccgggacaaatgaacagttcatggatgaagtgtacaggctagggcgtgagcataaagcggttactgacaacatgatcaagaataataaaatgatgcgcatgagtatgttgcagtccatcggaacgattatggcaatgtcaacacaatcagaaaagatcgctgccaattatgacaggatggcgaacccgttataccaagtcaacaaagcggggcttgccgtctcaaatacccttgaaaatatggcgaagcagggaactgcggcacacttggccttgaagatgctcggacctactgcaaatatgaaacagcttcaagatatgacagccatgataacacaggggtatatgcgttttcagatggtagcacttggcgcggccttcacaaactttttcctattccaagggttgcataaggcagccacacagaccgttcccggttattcaaaggcttgggaacagatgtgcagcactcttttaaaagcaattcagccagcccttgaagtattcggaaccgttgccatgtcaatttataaaggcgttaccgcgatcggaaaaatgattattcagttcaacaaagctcatccggtgctggcgaaaatgatccaaggatttttattgctcatccctgttttaaccctgcttttatcgcctttggcaataggagtggggttatttaatgggtttctcggggctctgagcagtctttggatgttcattggcccggtagtaacggggcttgctgccatgtccggaacagtctatgtagtcgccggatcaattgtcttgcttgtaacaggcatttatatgctttacaagaattttgacaagcttcaagagcgattgaaaccggctacggatgccatgaagcgctttgcggataccggaaaaactgcggtagttagtgccttccataccatgattaaagaggtgcaggggcttaaacctgcatttatgaaaggatttgaggattcacaaaaggttgctatatccgcaattcataagatgcaagccgaatccttaaaattatgggatcggttgggcgagtcacaccctcatttagtcgccgggattgaggctgcttacaaaacggctgttgatactgtttcctcatttgttcagaatgcaggaaaacgagtaaccgactttttcggaaagggattaaccgaagggttgaacagttttattaaaggcttcatgaatcaactcaagattggtttatcaagttttcaagggattgtgtcaataattgcgcctataattgcgtcgattggcctttctttcttgggagtatccggaccgataggaatagcaattggggcgatcctcagttttgtagggtatttgtatcgtttgaaagatgcaaaccaagcggtcagcagtgcaattcattcggcgtgggcgactgttcaatctgtgctgacaacggtattcacggccattcagccgattatcacgacaatacagcaggttttcagtcaactggtagcacaactgacaccgcaatttcagcaattagctggtcaaatgcaacagacgttcattcagcttgcaggaaatcttgttcttttagccgcagccgtttcacaaacactttcaacgatcggcccacaattgattccgttgatccagcagctattaactgcatggatgcaggtatcagggcaattaatgacgagtgtattgcagattgtcagttcaattttgccgttacttgttcaagggtttcagactgtttttccggtcattctcagcgtgataaatgcggtcttacctatcatcattcaattagtcagcagtttttcaggggttatcgttacgatcattcagactgttctgcctatcctggttcagacaattcagatggtctttcctttgattatgaatatcatccagcaggctctgccgattgtggttcaactgattcaattactcggatcaacgatcggacaaattgccatgcaaattctgccgttgattttaacggcggtgcaacaggtgtttccgatcatagggcaggtcattctggcggtcctcccggttgtcgcccagcttcttactttagcagcaaatattattttgcagcttgcgcaggcggctttaccaattttaattcaggtggtccagcaggtctttccgcaaattgtgcagatcattcagatggtgctgcctattgttgtttctctactgcaagccttggcaaacatcattactacggttgtaattccggcgatccgtttcatcctaaatatcgtgactgctgtgtttccggttgtgctctcgataattcaagttgcactaaaaaatatcattgcgatcatacagggtgcaatcggcattattatgggaatagtgaaggttttcaaaggcttattcactgggaatttccgcatgatgtgggacggagtgaagcaaatcttctctagtgcagtcggaatggtgaaaaagcttgtaagcaatatgggtgcagcaatcactgacagatggctttatataaaaaataaagtcgcgttattggcatatgatctgcgtaagaaagtcatggatcgtttcaacgatttagttgacggggccaagaaattaccgggcagaatcggtgatggaattaagaacatggctcacaaggctgtatctggtgtgactagcttagcgaacaaactttccggcgcacttggaaaaggcgtaaacggtgtaatcggcggagtgaactgggtactcgataagatcggtttgaaagataagcatatcccaaaatgggaagtgcctaaatatgcacacggaaccggaggacacccaggaggtccggcgatactgggagacggtaaaggggcaaacgctggccctgaaatgtatcggacaccttcaggacaagtagggctcagccctgcaacagatacactgatgaaccttccaaaaggcactgcggtcttatctgcaaaacagacaagggctgcattagcgggagttccagcatacgcgaaaggcacagaaggaaatatattcacaaatgcatggaatggtgtaaaatccgttgctggcaaagtgaaagatgttgctcttgatgtttttgattacatcgggcacccctctaagcttttaacaaaagtgttagaaaaaatgggtgtctctgcaccttctatggctggctcgttcggtgatctcgcaaaaggggcttttaactttgtcaaagataaggctgtaggttttgtcaaaggcaaaatgtccagttactctgccagcttttcaggcggcggctcgaaagccgttaaaaagtgggtagctcaggcgctgtcaattaagcatttaggccctgaatacgcaggggcactcgaaacaatcgcaatgaaagaatcaggcggaaaccccaatgttgttaacaattgggattccaatgcgaaagccggccacccgtcacaggggttaatgcagttcatcccaagcacctttaacgcccataaagaaccaggacacggaaatattaaaaatccagttgatcaaattctagcgtctattaactatctgaacagcagatatggcggtatcatgaaacatcccggcttggtatcaatggcgcacggcgggccgtacagaggatatgcaacaggcggcgtaatcaatagcccgcaggttgcggcactcggggaaaacggttggcgggaatatgtcatcacgactgaaccgcgttaccggaatcaatcactgggaatgtatgctgcgctcggcaaagagcttggggctgaaactggatatacaccagaaaaagcagcaagcagcagcggtggaacgtctgtaaatattacattcagcccgtctatcaatgtaaaagttgagggcggaagtgcaaaagttgaaactgatatttcaaaggctatcacccaatcactggaagactcttacgacagcctggcggctctttttcaagcggagggggtttattaattggcgaagcttgggaaggtcaatcttgttaacgaaaaagaatcagacggggcggatgtggaagtcacatcttatcccgttgaaaaaggcgtgccgattaccgaccatgtgcagagaaaaccggaaaccacaagtgtttccggttatttacttgggaagacggcaaatagcgactatgaatatttaaaaaagcaagcatatgccggcaatctcctaacctataccgggcgaaaggtcgcaaaagacgtgatcattacgaaaatcgaccgcgatacaggggaattttcaaacgggtttgcgataacaatctctttacaagaaatccgcattgcaaaaagcccgtgggttaagaagaaagtgaaaacagccggaaaaaagaaaaaggccaataagaaaaaaaccacaaaaaaatccagcaagatttatcacaaggtgaaaaagggtgatacgtattggggctgcgcccgcaaatacggaactactgtcagcgcattgaggcggctcaatccatggcctgacagaagaatacctatcggggtaaagatgcggattaaatagggagggcacgggaaatggctacgagggactacattccttttgataaagaggatattccgcagcagttcgaatttgatttagcagatgacacgtttattctgcgtataaattacaatcaatccgatgatagtttttcactggatttatatgagcaggatatgacgcctatcgtgctgggcgagaagcttatacttaacgttcctctgtggactgacattgtaagtgaaaacctgccggcccccgcccttatccctttagatgaatcaaattcagaaacacgggttacatataagaatttcatggaaaccgtgtttctttttattgatgatgtagctgacggatcggagggggatgacattggcgacgacgaataaaaagttgtttggccgggttgtcaaaataaccattgataacggcagttcgcagaccacatttgattacaaggatttagaaattcattttgaagtgcccttcgacgatgattttaaacccaatgaaacaaaagttgagatttacaatcttagcaaagattcgatcaacaagattaaaaaaggcagcacgataacggtccaggccggttatcgagacgactacggcgttttgacgattggcaaagtgacaaaggttctgaataactggaacggtttggataaggtgacgtcgatctattcaaaagacggcgatgattatacccatatgaaagtgacaaccgccaatgctgatcctgctgagaaatattatgtcaaaaaaagatataagcttgcaaaaccggttgttactgtcaggaaagacaaaaacggccgaacatacaagactgtcaggaattacgggacgcgggaagaggttaggtatcgcaaacgatacatgaagattacttttaaagcaggaaccacatcgaggcaaattgtagataaactgctgcgcgttctcggaattaaagtgaaaaacattatcctgccgaaaaataaggtgtacaaaaagggttaccgggtgactggcttaatagaaaataatttagaagaagtcatacatgatgctggagccgttatgtactatcgacgagggaaaccggttattcgcccacttaatcagggcgatgatgagcgtttcaaattagaagaggccaccgggctaattgagacacctgagcaggttgaggaagatgatttcaaaggttacaagacgaagtgtcttcttcagcaccgtatcgctgttgcttcaattattgaaatcaacagcaaaacagcaaaaggaaaatatcgagtgaaagagggtactcattcgtttgatggaagagactttttcacagaatgcaaggtgatgtaatgagtaaagcgacgaggtttttcgatgcttttgagaaaagaatcaaactatccatccatacactggccccggctcgcgttgtgaaatacaatgcggaaaagcatactgctgatctgcaattgttgtttcttatgaatgatggtgaataccttcatgaatacccgttgatcgaacatgcaccagttttaaagcatgttgaacctgatataaaggttggttcctcggtctttgtttcattcgctgaaagatcccttgataacttggatggaaacaaaacgtttgatcctgattctcgacgaacgcacagtatcaatgatccggtggtcataggagtgtgggaaggatgaaaacgctcaagcttgtagacggtgatctatgttttgaaaacggcactcttcagatggtcgaggggaacgaggaaattgctcaatcagtcgaattaaccttaaaaacacggttaggggaatttactctggatgaacatttcggcttggatcggagtaacattctcgggaaaggctttgaccaagaagaggcccaatacgacatcattaatgctgtgacacaagacgagcgcattgcgagcgttgaatcggttgagttttctcatgataaagagacacgaaacctatctgtccacttgaaaatgaagaaagaggatgatcaaacaatcgagcttgggggtgttgatcttgcttaatgaaacaggattccaacggcaaacctattcggagcttcttgacggcatggaggacaaagcgaaggagctgtttggcgaagatataaacacgtcaagcaaaacgccattaggcattatcctacgtatctttgcttggtttttggcgggaatttgggacattgcagagcgggtttataatagcggctttgtcagtaaatcggagggcgttcagttggacaggttgggaagtaatttcggtataagccgggagccggcggctgaggcggtcacaactctgttttttaccggggaacccggattcgtcatagaagaacaaacccaatatacaacggaatccggtatttattttgaactaatcgaagatgttgtaatcggggatgatggaacgggcacaggggcggctgtatcgctgtctaaagggattattaacaatgtcgcggccaataccattactgaacaggctgagacgttagagggagtttattcagtgaataatccggaagcagctgccggcggcactgacgaggaatctgatccggaatttcgggcgcgaattaaaaaatcagttgaaggcagttcagcttctacgaatagcggcatcatttcgtcattgcttgccgtttcgggcgttcgttcagcgaatatagtcgcgaataataccatgcaaacggatgcggacggaaatccaccgaaaagcattcatgcttatgtcctcgggggaacaaaagtagacgtggcgcaagctctgtttgacagcgtggcggccggtattgaaacagtcggagaacaatcggttgtcattacagatgcaagcggtttggatcatgatgtgaaatttgattttgcaaaagaagtaaaaatttatgtgcagcttgatttaaaaacaaacgcttcattcccagccgacggcgtgagtcaaatcaaaaagaatctcgtatataaaattggcgggattgatgaaaatggttcatcttttaccggctcgcagatgggtgatgatgttattctgtcgcaactttttaacgctgtatatcaggtgaatggagtttcagatgtaactatacaaatcgggaaggatgcggcggctctcagtcagtcaaatattacaattgaaccgagagaagttgcgcaagttcacttctctgaaatagtggtgaatctgatatgatcaaagatttaataggaaagctgactgatgcgttcttgaaagacgaaaagagcaatatcgggaagctttttttaattgtcgatgaacaattgacagcattaaaaaattcactgacaacggcggaacaatggcgggatattgacgcggcgcgcgggaaatcgctggaccttctcggggataacgttgcccaggatcggggccgggccactgatgaaatataccgcgtgctcattcgtggaaaggtagcccggaatgcctcagacgggacaacgaaccggattattgaagcgctggcgaaaacattgaactgcaagccgagtgaaataaacattgtgagcagcaaagaaaacaaccaggatgaaccagctgcaatcattgtgaaaaaggcgccgatcgaggcattaagcaaggtaggaatgagcgaaacgcaattttcgaacatcgttcaaaaaacggtggctgcgggggttcgagttgcttatgtggatttaaacggcactttctgtttttcatcatcagccagcaccatagaaacaagccaatatgggttttcttctgatggaaaagacggcgggaccttggggggcatcttccggccagaagatgattacccgttaccaatttaaggagtgtgatgcatatgccttttacaaaagaattaccagaatgggggaaccccggtcagcggccgccgcaaacgtccattgatcaagggtataagccgatggaccacccgccggccgattggtttaactggtatcaatatacggcctatcaggctttgaaagagttgcaaacgatcggagcaacgaaagaagatgtttcttctgctgtatctgatgccgaagcttatactgacaagcacgaaaaacggactgacaacccgcacaagacaacaaaagcacaagtggggctgggtaacgttgacaatgtgcagcaggcttccaaagtcgattttgatacacataccaatgacaatgaccgccatattacggctacagagcgcgtaaactgggatgccaaggagacaacagcaggtgcatcaaataaagctgctacggccgaaaggaatgccaaggaatacgccgataaacatatcgacgataaaaacaaccctcatgaggttacaaaggaccagatcgggcttagtaacgttgaaaatgttagacaggccgactattatgcgtttcgccaacacgacaacaacggagaacgccacacatcaaaggcagaacgggagaaatggaacaatgggcaattatcgaaaataactgatgacgcgggaggcgctctggtatctattagtgatacagatgacttttacagcaaaattgttcaaagtgggaagcgattcggtactttttattcaacaggaaaagcggtaaatgcccccagcacaagctctacaaggggggtttttcatttaacctcattagacagcaacggattggggacatacggttatgtaatcgcggtagacttcaaaaataatgtattctccaattatgtagacggcagcctgacttggagcgggtggaaacgccttttgtcagatggtgatttatcaccgtcttggaatactgtatcacttattaacggggcgaagcaggattcaagtttcccgtttatgttttcggtagtaaataataccttgtggctggctggatcattcggttccctgccatctataggaacagttgtggcgaaattcgcatataaaccgacacgcctacttgattttgcggttccgacaattgggtcatacgggactgcccggtttgctttcacaacaaacggtgagttgaggtatgacggtatgatggcaaatgataactcagcggtaacccgggtatcattcgataaaccaatcccattatggtaaggaggggagaatatgcatgttctattttacgacgagaataaaaagtatataggtgaagctgatattgagggaaaagagctgccgccgaatagtacaaaagcgcaaataaaacctggcatgtacgacccggaatttgacgagattaaaggtgaatgggttgaagctgcgactcgggagtacattgatcaaacaaaaggtattcctgaacccaatcccttaatggagcagatttctgcaatcagtaaacaactatcagcagaagagcttgcaagaaagcaagctgaagaaggccagcaggctcttgggatgcagcttacagatgaaatcatagcacgaaagcaggctgaagcagtcaatatatcaatgggcaaacagcttgccgccttaaagcttaaattgttggaattggaaggaggggtgaccagtgaatcttaatttctgggtatatgccttgttctacaagtgggcgacaaccgcaatggtaaagcaggcaatgggttttaacgattgtaccatcgacgatatgaaagagggtgtggctgctgcgtatgttacaccggatcagtttcaggaagtaatagggcaaccatacgaggaacaaccagaagccaattaataaggcttttttattttgcctcaaaggaggtgaaacgtatgagatagataaaaggggggcgtactaatgtcacaattgacggaggtacaagaagtgaatgcttttcaaaaagaaatgtcagaggttaaagccgagcaaaaggctcttgaacagcgagtgagtgttcttgaacgttcttcagacaggcatgatcagcaaatcatttcattaaacgaaaagctgaataaaattgatgaaaatacgacttggatcaaacggaccatcacaggggccataataacggcagtcagtaccggttttatcggcggggctatcgcgatcatgtataacctgctgcaaaaataaggaggaaaataacatatgaaaaaattcgacaaaggtacagtcgtccggactgtgcttctttttattgctctggtaaaccaagttttagtgatgtttggtaaagatgtgctaccgattgcagatgatcaagtgaatgaccttgcggacgcggtttacttaggcggctccatcgggtttacgatcatcatgtcactggtagcatggttcaaaaacaactatgtgactgaaaaaggccataagcaaaaaaccgttttaaaacagcacgatttaaccaagtaagggctgccgttcggcggcctttttatatttcaaaacagaataggagagaattttatgtcagcatttagaaaccaatatattgatattaataaatggacgcggccgggaatcaaaaacaacggcgtgaagaaactggctttacattacacggcaaaccccggcgcgtctgctgctaatcattatagatattttggtcaaacgctccccgcacagaacagaaatctgcctgagaaaaaacagacgtttgcatctgcacagatctttgtcgatcgtacagaggctatttgcatcatcccattgaatgaggtggcctatcatgcgaatgacgttcagcaattcgtcaacgggcagccttaccggggtgtcgcggcgctgaagccgaatgcgaatttcttgtctgtaggcgtggagctttgcatcgaaaaggacgggacttttcatcctgataccattgcccgcgcagaacaagtttgtgccgagctgtgcaaaatgtataaactcgatccaatcaatgacattgtgcgccattacgacattacacataaaatctgtccggcgccgtgggtaagcaactctcaagggtttaccgattttaagacccgtgttaaaaagcgaatggccggcgtggttgtaacggtgcctgtggtatcaaatccagatgttactcatacagacacaggaagattcattaaaaacacggtggtttcaagtgatgggcttgttttacgtacacaacggagcgcctcttcttccatggtgcttaacctgccgaatggcacagttgtaaaatatcagcttggatcaactgtcaacggatggggatatgttgaatacaccaattcaaaaggcaagacattccacggatatgtgaatgtctcctatatcaaaagcgataacgagctgaaaagcggcaacaagaagaaagcaacatcgtcaaagcctaaatccactcaaaaatcaaaatttagcctgcctgcgggtacttttaaagtcacaagcccattgacccgaggggaggccgtaaaacggattcagacagcgctggcggctcttcattattacccggataagagtgcaaagaatttcggaatagacggcgcatatggcgtgaaaacagcaaacgcggtcaaacgattccaatctatgtacgggttaactgctgacggcatctatgggccgaaaacgaaaacaaagcttgaatcccttctcaaataaaaaaagcccttccgattgggagggcctttttttaatcttcttcttttacacagtcttcgcaaaaaccagaaccgtataaaaactctacacgcttaccgcatttaccacattgacaactttcagccaaaagaaacactcctttcactcaatataagagaattataacaatatagaacaaaaataccaattttatttacaatacctatttacaatggtaaacagatattgtataattgaagtatagaaaggaggtgctgaggtggacgagatcagaaacatcgttcttatcatcgctggtatcgtgaccattatcaaaaacatctatgatatatggcagaaagaaagcgaaaagcgagaaaagaacatgaaaaagcgctcccgccgggtaagcaagaagcgctaaaaacatagtgagacaaggggagaaaatccccttgctccattattatatcacgtccacgacgatatgaaaaaatattttaagcagtacagctcgtttgatatgaccactcttattatcatcattgctggtatagtggctattgattacgaatcagccggtacccttgggaaaatcacaacgtttgttttatacttggccgtaatggttattttattaaaaggattttttatgatgtggagagaaagccgacatgaaagaaagtgaaaaaattaggtttatccaagatgaagttttgacggctgctgaagttgccgagctgctttctgttagccggcagcgcgtaagccagcttgtcagcggcggccggatcaaggcggtaaagaaagtgggaacggtggctttgttcttgctggaacatgtacaagctttaaaaaaagaattagagacggagcggaaaaaataccggccgtatgatgaataaaagcccttcttgagttagaagggcttttgtttatatggttttaattttattcttattcttcgtagagcttatctactaactccgtaaatgagttacatatatgactcaaagcaccttcagggttttcaaatgcaatttcatgatcccaaaaaaccactgagggattttctttattctgacgataatcaaaacagatttcgttaccaaaaggatcacaggcaaaaggaattattcctgaaagcattcttccgtcctggtaatcttctaagacttctaaaataaaacttgaactatcttcagttaaaccatgtaatcgattaaaaaccgcgccttttgtatttttaaagtcaaatatctttttacttggacgtgccccattgttatttaatatagttgaaatgtagtcgtttggaaacttaatatctaatgccttttcgattttttttacagttgtttccccgatgggctcttccgcaaatctccactctgtcatattgaccaactcctatctgttcttacttcctccaccccaaagatgccggcctcctgtatggcctgttttccgatgcaccttttggtcaactaattgcattctccctggatcttggtgatgatgccaagtatatccgtctggtgtttcaccagcttttatcatttcgatttgaaggtcattgaattgatttctaagtaaagggtctttttcaatttctttttttaattttaaggttgcatctttaaattgtaaataatcgctttccttataaagattagaatcaatcttcgtatcaaatcttgctttaaaaattgggaaaccgtctttattatatggaacgccagttttaggatgtttttcgtttttaagatggcccattttcaagttaactgttttgaggtttccgtattcatctctataagtatatggtgcggctttagtaaacaaatcatcctttgattgtactaatctctttaaaagcggggtgttttttacattatgggtgttttcaatatcttgtactattccaacaagggcaggttcgttcttatttttcaataaagagttgatgtagtctgttccgttttttattcctgtgtgtacatggcttgcagcgccaggctccaatacttttcccgccttggagaagcctgtttttgcaagtttacttgatacgttaaccgtcgagcccacacctttcaggccgacaagactgcccaccgcataggagatgtagtgcgctctagagtacgtatcaccattcaccatttgatcattccacgaatcggctaggtttgtccatatgatttttgcgtaagacggagtattcaatacggtagaaatcgttttaacaaccttttgttcatctgagagctgataaaagtcccaggcgccgacagcgaggtctttcagacctaacacagtgtctttcccaacatcataaaggccgactgcaacccctttgaaaccatctgtgagctcttgcgtgttttcaatttgagtaaagtatcgctgctgttcttttgtcaggttttcatagccgatcgttttggccattgagtagaactcatcagcatttgcatagtcgaaattgttcagtcgttctttcagtttttcgacctcacgttcccttgcttcttctttcttaatcgtaagataagcatccgagtgccttgtaatctcgcctttcttcttatggatgtcgctttcacggtacaccttggcattgtagtgaagcggagcggcgtttttccctttgcccgtggcgttttgaagttgttggaagtcagcttgaatgaactgttcgttcgcttcggtttctgcgtattctttcgttaaatcgtgatcaagcttgccgagcttatgtatcgtttcgcttctttttttgtcagctgaggaaagcttctgatctgtgctttcggttgaaaacaattcgagcgagatgatgtcttcgatctctccgaggatggagcgcatgtcttttttctgctcttccataatcgcctttgatttactgagggcgtgggtgagctcatgctccagaaatgattcctccacatgcgaattggaaagtccggcatcttcgaccttaccgggaaggcttgtgagaaatgcgattttgatatcgatcagatcaagccagctgtctgtgacgccggcatggtcttggaaaaaggctttgatgttgtcagcgccccggcctgaaaagtcgctgtcaccgaggtcagccataccttgaaacgctttttttagattgaccatctggccgcgcagttctttgtattcactcgcacgctgtttggcagcggtcagcagggtatttgcttcgaaaactttcatgaccatatcctttcatacgaaatactttaacaagatattaccatggaagaatgaagaaaaagatcgctgtacgattcaaaaggggaaaatgaatagtttgacctgagtctttttgcttattcttgagtagttaaacatttaagtaatgagggttgtcacccggcagcgtttaaggcccccttgtcacttttggaatgctcaagccggttaaataggttgggacagtcgcattgtttttgcttggacatgtacaagctttaaaaaaagaattagaggaagagcggaaaaagtatcgtccgtatgatgaatgaagcccttttcaaaatgagaagggtttttctgcaatttatttaaattcacttacaacagtaaatgcgtaaacggagttcaattgatgtaaggtttgacgtctgagggtatttaagggcaggagactagacataaaatcctgcatttattgagataagtagtcgtttatacctttcggtgatcaagtgagtaaaactaaatgatcagggggggaaaagctttcctagttaattttaaccaaaatatggtactggggtttttttgaaaaccagagtttgatatggttttttaaaaggaggaatgtattttgaaatttaagatttttagttcagtaatgtcaatcgcaattgcatctagtttaactttgccgtcatttgcttcggctgaaactttctctgcccctaaagtttctaaggaatgttcacaaccattatcagagggggaggtgaccgataaatacgggaaacctattgaattaaaagatacggatactgatatgaaaattgcattagagattgcaaaatctgatttagaagaaaaggcagtagttaataaagagggttttgctgaaaacttttacaaaaatgcaaaagatgcaaatgttagtgaaaaagctttcgaggaatttaatgcatcattggaaaatttaaataagggtgtaaaaaacggtcaatataaattaggtagtaatatatctgatataaacgtatcagccgcagaagatagtgatgtttctgctcaagcaacatggttcatctcacattctaaatctgcaaaagcccaaaaattaattttggcgggtgcaggtatttctttgcttgcttctgaattaggtgttccggttctcgtggcttctggtttagctgcactagcatccggagctggcctatgtgattggaatgacaaaggtttttatttggtctatgctgctaacattttttattgtgtgccaaagttttaaaaaattaaaagagttcagggtgggctaaatgcataaaattattaattacatcttggtaagcttgttattggtgtatatcattgtttctttttctttggattttagtaacaatgatattccatatatttttgttgctctgattctcatcattgtttcctttatctttgagaagagaaagtcatataaaaattgaatttttcaagcagaaaggcctttcctaaacggaagggccttttttgagttgcttatccataacgtcattttaacaatgaacccaaaaaatagtaatattttcccttgtctctaattgcgtaaaaacgaaataagaattgcggtatatcgaaaattatttctatatattacatattatgctaaacgtatgctagaatattgtttgagaaaatttagaatatttgtagaaagaggggtttatcatatgagtaaactggcttctgaaagagttgcaaatatattaaatgattggtatatcgcgataaaacaacaagacgtagagtctgctaagagatattttgaagagatcaaaccattgtttgatgaaatggaagaggatcaggaagttttgatgtattattctttgctggaagagcgacataaaatgttactttaccaaacgaaaggagagcaattgccgaaacactcctattttgcgaataagcatgcaaaggaaattgaaaaaacggatgccatgatagaatattacttttatttatttgaagcgctttacgagtcatacaatagaaatttcgagagcgccatcagtctatttaatgacgcggaaaaaaagctttcattaataccagatgaaattgaagctgcagaattttattcaaaagttgcctctatgtacatgatgttgggccaaaacatcgtatcgttaaattatataactaatgcaatgaatatctataagaataacgaaaattatttgaagcaatttgcgacctcgttaatggtggttgctcataattacactgaattgggacaatacgaaaaatcagaggaacattatttgcaagcaattaaagtggcaaaaaaattggacgattcttttttcgcagcaatgattcatcacaatttaagcattacatactcagaggcgaagcgatcgcaggattgtcttaatgccatcaagcatgcattaagaaataaagactggtgcggatcatcgtattatattcattcgttatacatgattgcaaaagagctggtggtgatgggggaaaacaataaagcctcatattatttgaaaaagggacaggaaaatcttagacaaaaacagaataaaatatacgaagctaaaataaatattattcatgagctttcacaaagtcctttaaatgagcgtgttgatcggattcacagtcatatgaacagattagcagaacaaaatgactttgacagcattcgcgatctagctctaatcacttcaaaaaaatttgaagaaaggggactttataaagaggctctaaagttttctaataaagctattttagctgaaaagaaaatgaagcagttggagggaatttgatgaaaaagagaattctttttgcggcattatctgttgcttgtttgagcgggttagctgttgcgggctttatagggttttctaataaacatgtagctgaaaagccagtcggtacttatatattagctgaaaagccagtcggcacataataaaaaacaagtctcaattaaaagatgggggtcataatatgacaaaaggcgttaaaataacattatggagcatcttagggatagtcatcgtgttaatgataattggagttgtctctttttatcagaccccatcttcataaagtgaaagcagaaaaaagcccttagatagggctttttttaatagtcatgtttaatatgtactactcctgaattacttatttggataagtgtatttgctggcttagttttcattatttttatgatgaagtttcttatttcagattgtttaacagctctttcacgattagaaatgcttccatactgtccttctttataacagtcatgaaaacctactgtgtccgtaccaacaaccgagtaaattttaacattttcccctgcgctgggacttgtcattttcattacgtttactatttcaggtttatcttcagttatatccttaaatttcatggcgctcctccttgagtctgctttttttatatttgatctaagaatgttaaaagctctggatcattgattttaaacaccataaattgaatgtaatctatctcatttgtgtcagggaaacagaaatttgttatctcaaagtgtgttccggattttcctaatatgccagcaatacgcaacgcaatttcaacattttcaaagtctatgttgaaagctacaaatttttggttcgaataataatctcttatttttgaatcgctagggttacacggattagacatagaatttaggaaaatcttcaatttttcagttgggaaattagtcattttttcagttaacctccgaatattttggtatatcataaccgaaatgaaaaaatattgaaagggatggaaaaactcttatgtggtttgctggtcgttgattttctgcagtctttaatcatcaactgtagcaatcgtttcaaaacgtccacttatttttatgcttatcccatttcagcatacgctgcctcataaggttcttcactgcttcccggataacgcgttcatccttaccggtttttctcttcaattcatccaaggagggatttttcccgaaacgggtcatgtttatgatgatcctgtatactttcctctcaaaatcattcattcgaattacctcctgcatagaataataccagaacaaacattcccttttcaacttgaaatagaacaaaagttcgtataagatgatagtaaataaggaggggcagcagcatgaaagcattgttaaatcgttcgttaaatgaaaaatcagcactggacatgatttatataaaagcagatggaacagtctcgaaaagaaccatcatagtgcaccaggtaaaacaaaattttatccgggcattttgttttaagagtaggcagacaaaaacatttaggatcgacaatattcttgctcttgccccgaccaattataaaaaaggggtaaggaatcatgcgtgatatgacaaaaaggcaatctgaaacactgcaagcgattattcatttcattaatgaacacggtgtggctccgacttatagggagttaatgaaacacctcggtttaagctctacgagcacagtaaaggggcatctcgacaaattaaaggagaagaattacataacgtggcagaatggttgcccgcgtacgctgaaattggaaaaaagagctcagcaattctgaagctctttttctattgactgcactttttccgcaccagcctacaattggacaagaactgacgttcgtgaaagttgtaggctgcccgcaaccattatgatataattttgaaaaatgtaccttttgcaaacggggtgatattttgttttttgaggaaaaaaatacagaggaattgatcagatatgaagattatccctacgcggtttatgccagggtttcgtctgaaaaggatagccaaacaacatccatacaaaaccagatagacatatgccatcattggattgaaaaaaacaactatgaatggaaagacgaggccatccagctggacgacggtataagtggaaccattcttctcgaccgtaaagccatgcagctaattttaaacaaagccaagaatcacaaattgaaaatggttgtatttaaatccatcagccggcttgcaagggatctgaaggatgcgctggatataaaagaagttttgttggcacatggcgttcgtgtagttacgctggaagagggatatgacagtttatatgaaggaaaaaactcaatgaagttcgaaatgttttcaatgtttgctgctcaatacccacagacaatatcggtttcagcaagtagcgcgctcgcagcgaaagcaaggcgcggggagcattcaggccgggttccgtatggatataagaaaaacggcaagtttcttgaaatttacgaagaacaagcaaaagtgattcgcatgatttttgatttatacaataatcacggttatggccagaagagagttgtgcacaaattaaatgaagaattgctgctcggcaatattcccaagcctcagcagaatgagcggtggcaactatcaactgttcagaggattttacaaaatccgatctattgcggtgtgttcattgcaaaccggtatactcaagtgaaaatcgggggccgaaaaaagttcatccgtaacccagaggaaaaatggacgatttataaagactgggcgccgaagatcattacactggaagattacgaaaaggcgaataataaaaagcatgtgctgaaaaaacggcgtttcaatccgaagaacgaacttcgcggcttaatgaagtgcggtgtttgcggcgcgaacatggtcatcctgttcagttatagacgcaggaaaaaagacggcgtgaaagtggagcacaattatgtgaagtgcagcgcctaccgacgcggagggaaaaacatgtgtatttctcacccgcccatccagtataaagatttacgcgaaatagttattgaaaagctcaaggagaagggccgtaaattaaaactgaatgtgaaatcagattatgaagagaaaaagaaaaggcggatcagagaaacaaaagttcaaattgaagcagctgagaaaaaacataaacggctgctggaattattcctcgaagaccaaatgatctcaaaagcggaattccaatccaagcggaaagagatcgaggaacaattggaacagttaaacgataagctgtttctgcttgagcgtgaagaagaggaatcaattgacattaccaacattaaaatcgcttttagtcttctaaagaaaaaggaccaggatttgtatgaggcgtttcatgcgcttatcgaaaaattggtcattcatgaagatggaaccgttgattttcattataaattccagtgatcattctcatttatgtttgcaaaagatatgcataacaaatgccatgcagaagttaggtgtgaaagggcgttcgcaagctgttgtcgagcttcttagaatgggtgagctagagctctgattcttgccggttttccttcttttcgagaaggagccggttatttgcgttggcgcccgggctgatgggcatgcggtgaaaatcccggtttttcctttttctccgtcagtcttgcattttcttaaaaaaagaaggaaaatagacacggagcgcatagcccagaaagatccttgagtgagggatggacaaatgacatcaaaatctgtagagcatgttgcggatatcgaaaaatcactccgccatatcgctgcgatcattaaacaaaaaggaagagaaatccttaaccaatatgcaattacaccgccgcaattcgtggggcttcaatggctttatgaattgggggatatgacaataggcgaattatcaggcaaaatgtatttggcttgcagcacgacgacggatctgatagaccgcatggaaaaaaataagcttgtcgagcgggtcaaagacccggctgacagacgggtcgtcagaattcatcttctcgctgaaggagagcgcattatccaagaagtgattttgaaaagacaggcttatttgcgggatatgtttgcgacattttccgaagaagaaacagccgctttcgaaaaatcattattgaaactgcagcatgaaatgaaaagaaaatgaggcgattttgttggaacagccgataggagtcattgattccggggttggcgggttaaccgttgctaaggaaatcatgagacagctaccgaaggaaaatatcatctatgtgggagatacaaaacgctgcccgtacggcccgcgtcctgaagaagaagttcttcaatacacgtgggaaatgaccgattacctgctggaaaaccaccatatcaaaatgctcgtgatcgcctgcaatacggccacggccattgccttggaggatattcagcgcaaaacggatattccggttgtcggcgtcattcagccgggtgcaagaacggcgataaaggtcacgaaaaaccagcatatcggcgtcatcggcacggtcaataccattaaaagcagagcgtatgagcaggcgctgctcggattaaacgcagaacttcaagttgagaacacggcttgtccgctgctcgtaccgtttgtggaaagcggacggtttcttcaggaatcagcggaggaagcggttgaagcatcgcttgagcctttaaaaggtacatcaattgacaccttgattttaggatgtacacattatccgattttaaaggatccgattcagaactatatgggagagcatgtgaaaatcatttcctccggagacgagacggcgagagaagtgagcaccatcttgtcttataaaggtttgttaaaccaatcgaaacatgcaccggagcatcaatttcttacaacgggagagcggaacggcttcgcaaaaattgccgaagactggttcggccacgaaatcggccatgtcgagtgcatctcccttcaagagccggtcagaaaataaatcaaaaaacccgctgtttacggcgggtttttttgcgcttcccggtctatttcccggacagggctcgtatacatcatagtacaaacagccttaggagggaaaagtatgctgaaaaaaggacctgcagtcattgctgcaacatgtcttacttcggcttttgtgttatctggatgcggtttgtttcaatccgataaaacagccggggaaattgacccgcctcaagacatttcatatgtaaaggatgaagcgggaattcaggcaaaaccaaagcagtcagagaaaaacggcacttctaaagccgaccagccggccaatacagtcatgcgagagctgtatctgattgataaaaacggctatgtcgcagcacagacactgcctcttccgaacagtgagggaaccgcaaagcaggcccttgagtatttggttcagggagggcctgtgtcagaaatcctgccgaacggcttcagagcggtgctccctgcggatacgacggtaaatgtcgatattaaaaaagacggcactgccgtcgctgatttttcgaaggaatttaaaaactataaaaaagaagacgaacaaaaaatcctgcaatcgattacatggacgcttacccaattcagctcaatagataaagtcaaaatcagaatcaacgggcacgagctgaaagaaatgcctgtgggcggcacgccaactacgggcgacttaagcagaaaagacgggattaatattgaaacggccggagtgaatgatctgacagacacccatccgctgactgtctattatctggcggaaacagagacgagcgaatactacgtgcctgtcacaaagcggattgacaattcggaaacaaatgacatcaccgctgccgttgaacagctcgccgacggaccgggcaaagcaagcgggcttttgacggactttaataacgatgttaagcttctcagcaagccgaaagtaaaagacggccaagttacactggactttaacagctccatttacggaagcgccgacgaaaaaacaaaaatggtatcatcgggcgtactggacagcatcgttctcacattaaccgaacagccgtcgattaaaagtgtttctataaaagtaaacggaaaatcagaactggtgaatgaaaaaggagaatccctttcaaaacctgtttcgaggccgtcacaagtgaatacgggtagtttttaatttgcgatttttgatatactagtaaaaaagaggttagcgttccggctgcctctttctttattcacaatccggaacaaaaggtttatgtacatataatcggaggtaaaatatgagacacgacggaagacagcacgatgagctgcgccctatcacatttgatttggattttatcactcacccggaaggctctgttttaattacagcgggaaatacgaaggtcatctgtaatgcatctgtggaagaccgggtgccgccatttttacgcggcggaggaaaaggctggatcacagcggaatacagcatgcttccccgcgcgacgaatcaaagaacgataagagaatcttcaaaaggaaaggtctccggcagaacgatggaaattcagcggctgatcgggcgcgcgctccgggccgtcgttgatttggagaagctcggcgaacggacgatctggatcgactgtgacgtcattcaagctgacggcggaacaagaacggcttccattaccggcgccttcttggcaatggccattgcgatcggcaaactcgtaaaaagcggcgttatcaaaacctctcctgtgacagattatctcgcggccatttctgtcgggatggataaagaagaaggccttcttttggatctgaattatgaagaggattcgacggctgaagtcgacatgaatatcatcatgacgggaagcggacgttttgtagagcttcaagggacgggcgaagaagccacattctcccgtgaagatttaaacggactgttaagccttgccgaaaaaggaatccagacgcttattcaaaagcaaaaagaagtgctgggagaaacattgcctgaactgaaataagaaagagaggcctgatcaccgtgaaagaagccattattgcgacacacaatcagggaaaagtgaaagaattcaaggaaatactcgaaccgaaaggctacagcgtctcttctttggcggaaatcggatttacggaagaaattgaagaaaccggacatacttttgaagaaaacgccatcttaaaagcggaagccgtggcaaaagccgtcaacaaaatggtcattgcagacgactccggtttatcggtggacaaccttggaggcagaccgggcgtttattcagcccgttatgccggagaagcaaaagatgataaagcgaatatggacaaggtgctgtcagaattaaaaggcatcgaaaaagagcagcgcacggcccgtttccgctgcgcccttgccgtcagcatgccggggcaggaaacaaaaacggtcgaaggtcatgttgaagggtatattgcggaaggacccgagggggataacgggttcggctatgatcccatttttattgtaaaagataaagataaaaccatggcccagctgacaagcgctgagaaaaacaaaatcagccacagggctgaggcgctcaagaaactgtcaaagctgcttgattcataagggggagcgtatgcaatgaaagtgctgataataagtgacagtcacggccttgaagacgagctggagacgattgcaaagcggcacgaagacgaagcggatctgatgattcattgcggtgattcagagcttgacgccgcacatccggcactcacgccgtttcacacggtaaaaggcaattgcgactttggcggcgggtttcaggatgaacttcttctggacgccggttcaaagaaaattctggccgttcacgggcatcttcacggcattaaacagtcacttttaactgttttttaccgggcggaagagcttggggcggatgtcgtctgcttcggccattcacatattgccgggagtgaagagcttcggggcaagcttttgattaatccgggcagcatccgtcttccaagagtccgcaatgtgaaaagctatgccattcttactcttactgaaagagaagtcgccgtgacattttacgacgaaacgggtcgggaattgaaggacttggggactacaatcagtttttaacaagtgatgggggagatttcattcttccccatcaaaagtttttaaaaaaatattgacttatgatttgaacctgtatataataaatcttgtcgctgatacataaagcaaaagctgtcccagtagctcagctggatagagcaacggccttctaagccgtcggtcgggagttcgaatctctcctgggacgtacaaaaaaaagagctggtgacatcagagtgaaaactgatgccgctggccttttttatcggatgcctatattgtcaattcggtgaaatcatggtaaaatgatcagcagaacaatttgtttttcatgtcccagtagctcagccggatagagcaacggccttctaagccgtcggtcgggagttcgaatctctcctgggacgctaagaaatcgggtgtgaagcccgtcaaatcaacctcttatttcgtttagtgaaacggtcagtataacggtcaagtaagaaattacacctgttattggcttatatcactttcggtataggaggttttttgttgtgaccaaaagaaaatgaaaatgaagctgactatgtgctaaaacgcaaggtaaatatcatgaaaaaggctgaaaaacgtcacaagcaaaggcttcaggaatacaaggaacagaagattggatttgccactgaggagaggaagtatttattagactcttctacacgcagcaagtacttgaagatatctttgctggctatgacttgggagttaagaggttacacttgcagaatctatatatggagcggatgcggcaattattcgatttatataacctaaaaggcacaaactttgtaagagtctcttaattgaggctcttctttttatcgatcaaatctgatgtcgcagctccgatatttaaacaataactaataaaacccgtcttttattcacttggttaaagaatgaacctaaactaaggagcagagtagaaaaaagagcgatacatattattcctaatttttgcatgattatagtataatagacacaaacaaccttttaggaaaacggtgataacaatgagtggcaacttttcattttttcaagggaaatgggatgtacttgctaacttgggagagacagctgagagaaatgtatatcatgacccccatacaacagtaatgaaactgcgattgttcgctgaaacactaactaaatttattcttgccgctgaaaatattaaagaggcatatggtacaacgcaagtggatcgcattaacactttgcgtcgggaaaggttacttgagcctgaattaattgatatattagaggctcttcgtcgcaaagggaatgtagcgatgcatgaagcggattatggaaaagtagaagaagcaaaggctttgttgcaattaacgttccgcttgtccatttggttcatggaggtatatggtgattgggattttcaagcaccagagtatacagaacttcaagaacaagtagaacagagtacagaaacacttcagcgagaatatgaggaaaaagtcaaaaagcttgaagaagaattagaggcaattcgtcgacaggcggaagtggaacaagaagaggtaaaaatcgagcgtaaaaaaatatccaaaaactttatgcgtcgacagcaattaactgaagccgaaacgcgtacgattattgatggaaaactacgtgctgttggatgggaagtagacacaactgtactcaatcatcaaaagaacggaacgctgccagagaaaaatcgaaacatggcaattgctgaatggaaggtcaatggcggcaggattgactatgcgttgtttattggcttaaagcttgttggctttattgaagctaaggcaaaaaagaaaacgattcctggcgcattagaaagtcaaacaaaagtgtatgcaaaaaatgcggcacaagtcgaagatgaagtcatcacacctacaacaggtgaatataaggtgccgttcttatacgcaacgaacggccgaccatacttgaaacaacttcaagaagagtcgggcatctggttttgggattcacgtaaaccgttagaacatgctcgcccattagaaggctggcattcacctgacgacttgcagcttcttcttagtcaagatgataaggatgcgaataaacgattagaagaagaggatattacgaagtttggtttgcgtcattatcagcaaagagcggtactttccgctgaagagggattaaaagaagggcaacgaagaatgcttattgcgatggcaactggaactgggaaaactcgtacagctatcgccctcatgtatcgcttaattaagtccaaaaaatgtcgtcgtattcttttccttgtagaccgtaattcgttaggaaaacagacagaggatgcacttaaggatacaaaaattgaaggctactcatttgctgatatatacgatgtgaagtctttagaagacatgtctccagaagttgaaacgaaggtgcaaattgcgacggtgcagggaatggttagaagacttttctatagcgataacgaaaagcttccaagtgtcgggcagtatgatttcatcattgtagatgaagcacatcgtggctatacaagtgacaaagaaatgtcagaggaagaattgaaattccgtgaccaaaatgattatattagccaatatcgacgtgtaattgattattttgatgcggcatgtttaggacttactgcaacaccagctcttcatacaacagagatttttggtatgcctatttttaagtattcttatagtgaagcggttctggatggctacttagttgaccatgaaccaccatatctgtttaagacagaactttcacaagtcggcattactcttgaaaaagacgaagaagttgaagtgtatgatgttgataaaggcgagattcaactagaaaaaatggaagataccattcattttgaggttgagcagtttaataaacgggtaattactgaaccttttaatcgggcggttctaaacaaactggttgaatacattgatccgacaggaaaagagaaaactcttatctttgcagccactgaccaacacgcagatttggttgttcggttattaaaggaagcctttaaagaacgtggcgatgaaattgaagatgatgctattatgaaaattactggctatatctataagccattagatgccattaaaaggtttaagaacgagcggctgccaaatgtcgttgtaacggttgatttactcaccacaggcattgacgttcctccaataacaaatctagtattcttacggcgtatacagtctcgtattctttatgaccaaatgcttggacgtgcaacccgtctttgtcccgacattggaaaaacacactttaacatttacgatgcagtgggcatctacgataaattgcaaagctatacggagatgaaacctgttgtaaagaaacaaaattacagtatcggtgaactatatgaatcacttgccaatgctactgcagaagatgaagcttcgttttatcgtaaccaattggcagcgaaaattcagcgtcgcaagcaaaggctgaatgaagaaggaaaacaaaagtttgaagaattgtcgaatggaaaaaatgtggatgagtgggcgaaagaaattcagttatatactccgcaagaagcaaaacagcacaacatgttatttgaatatatggaagcctatcgggtaaaaggcgagaaacgatatatctccaacaaagaggatgaagtaacagatgtggttcggggatatggtgaaggaaacaagagaccagaagattatttagaaggtttcgttcgttttatccaagaaaatattaatgaaattcccgctcttcatcttatttgcacacgaccgaaagatttaacaaggcaggatttacgagaacttattaccattctagaaacgaaaggctttaagcaatcgcatttgcagacagcttggaagcagacaaaaaatgaagacattgcagcagacattattagctttattcgccaagctgcattaggtgaagcactagttgcccatgaagcacgtattaaacaagcgatgcaaaaagtgtattcactgcatgattggactccaagacagaagaaatggttagagagaatagaaaagcaattacttaaagtgcctgtattagcaccgactgcagaagaggcattctcggaagaaccatttaaaactccgggcggctataaattgctgaagcgggagttcggtgactatattgatacggttgttaccactataaatgagaacctttatattagttaacaatgtgcctcttcataggggcactttttcagttataatagataagttactttatctttgattttcactttaatgaggtttgaatgagaatccaacattaaaatatactcagagttagcaggaggctgaaaaatgaacaaccaagaaatcgttcaaaaactatggaatttatgtaatgtgttacgtgatgatgggattacctatcagcaatatgtaacagagttaacctacttattattcctcaaaatgatgaaggagcaggaaacagaaggtgtgattccagaaggatatcgatgggatgatttgttagataaagaaggtttggaattaaagacattttatcagcgattattacttgaattaggaagcagtgaaaatgagcggctgcgtctaatatacagtgatgcttctacaagtattgctgagccgaaaaacttagagaagattattaaatcgattgatgcccttgattggtacaatgcaaaagaagaaggactgggcaatctttatgaaggattgttagagaagaatgccagtgaaaagaaatcgggagcggggcaatacttcacacctcgtgtattaattgatgtgatggttcaattaattgacccgaaaattggtgagcggtgtgctgaccctgcagctggaacattcggtttcatgattgctgcagaccaatatttaaagaatcaaacagatgattactttgatatagaaccacaagaagccgagttccaaaagaaagaagcctttgtagggatggaacttgttaaagatacgcatcgtctggcactcatgaatgcgttgcttcataatatcgaaggtcgtttggaacaaggagacacgttatcgggcaacgggaaatggatgaagaactttgatgttattttaacaaatccgccgttcggtacaaaaaaaggcggggaacgggtatcccgtgacgatttaacgtttgaaacatcgaataaacagttgaatttcttacagttgatttataacgctttaaaagatgatggaaatgcaagagcagcggttgtcttgcccgacaacgtgttgttcgaaagtggtattggcgcacaaattcgtcgtgacttgatgaacaagtgtaatctacacacgattttacgcttaccaacaggaattttttatgcgcaaggtgtaaaaacgaatgtcttattctttacaaggggaacaacagaccaagataacacgaaagatgtttgggtctatgaccttcgtacaaatatgacttcatttggaaaacgtaatcagctaacaatggctcattttgaaaacttcatgaaggcatatgtggcagaagaccgttctaaagtggaagatgaacgctggaatgtgtttacacgagaagaaattgccaaaaaggatgatagtttagatattggattgattgcggatgaatcattatcttcatatgaaaacttaccagacccgattgaatcagcagaagaagcgatagtgaaacttcagcaagcaatggatttattaggtgaagtagttgaggagttacgtgctgttgaagaggatggggtggtcagaaaatgagtaagacacaaaagaccatcgaagagttgatggaagaagtggtagtgccacatgaggaacaaccttatcaagtgccagagaattggatgtgggttaattcaggacacatattgaacttcataggtgggggcacaccttcgaagagtaatagtgattattggaatggagatattccgtgggctacagtaaaagatattaagaatgggtatttatcatctacaatagattatattacggttgaaggtttggaaaacagttcggctactatggcatcaccaaatgaactcttattaattacaagaatgtctcctggtaagagtgcaataacaaagatatcgacaaccattaatcaagatttaaaaatagtcagaccaaaaattgaaatactgccttattttttgtggttattttttacaatgaataccccgttaattgaatcgatgtcaacaggctctactgttaaaggtatacaagtagagaaacttaaaaaaatcactttcccactgccaccatttaatgaacaaaaacggattgctgagaaagtggagcggcttttaagtaaagttgaagaagcaaagcagttgattgaggaagcgaaggaaacgtttgaccttcgtcgagcggctattttggataaggcgtttcgtggggaattgacaaagaaatggcgtcaacaaaatctttcagtagattcggcagcccaaagacttgagatgataaaaaaagaaagatttcaaattgctgaaactaagagagaagtatctgaaataatagagatgtttgacgaacttaatatagtggaatgtataaataataatgattggttgtatataaaggcaaatatgttttgttataacataaattgtggaggtacaccttctaaagatatttctgaggaaggagaaattccatttttaaaagtttataacatagtaaataataaagttgacttttcgtataagcctcaatacattcctaaagaggttcataaatcaaagttaaagaaatcaatgttgagacctaatgatgtaattatgaatatagttggtccgccattaaaaaaaatagccataattccagaagaatattctgaaatgaacatgaatcaagcgattgtccgttttagaccaataaaatatgtattaccaaaatatctttattactgtctacaatatgatgaaacgttaagagatgtaatcaatgaaactagaggtgttgtaggtcaaagtaatatatctgtttctcaaagtagaaatttagttatgccaattccttcaattgaagaacaagctgaaatagtaagtaaattagaggaaatgattaagagagaagaaattgtgttaagcctagtgtctgatgaaaaaaatttagacgaactaaagcaatcaattctttcaaaagcattccgaggtgaattaggaacaaatgacccaagtgaagaaagtgcgattgaattgttaaaagaagtgctgcaagaacaggtgaaatagttataagaaggcatccaaattaattggatgcctgtcttttatggttgcgttgtggtattggtttgatacagaaccactctcattcacaaactgacaatcggtaaatttccgacacgactcacattatgaatgtgatttagcatggtaaagtaataagagttgcagtgaaaccctattcgagttcgataataatatcgatagcagagggtgtagacttataagtgatatcaaagaaaagataccgatgcctcaaggtggaatcaattatggacaacaaagaatttggatacgttagagtaagcagcaaagaacaaaatgaagcacgacaactggatagtatgtatgctcttggaagtgatgagcgtgatatttatatcgataagcaaagcgggaaagacgtcaatagacctcaataccaagctttgaaattgcgtttgcgtaaaggagatacgtatacatacattcattagataggctaggtcgtaacaaagagatgattttaaacgagtggaaagatatcacacagaacatcgaagcacatattgttgtaattgataagccattgttggatacacggaaatacaatgaatccatcggttctttcgtggctgacttggtgttacaggtattctcgtgggttgcatcagcatcgcaatagggacagcattctttgttatctctcatgaaaccacttctttaaataaatacctataccttttaacatagcagatttaagtacaactgtattacctcttcaataggttttttttctactatatgaatgcttgaactgtacagtataagcaaatataatagaaattaagtcaatcggtcaaagttcggaaagtgaccgttatacatgaacgtaacgatagcgatatgtaaaggatgaaggccggatagagcaacggccttctaagccgtcggtcgggagttcgaatctctcctgggacgtataaaaaacctcaagtcctgacaatgggtttgaggtttttttgtattttatttttttattttacgaaacaaaagttccgtatttgatgaaaaattgtaaagtaattttaatataaatgaaacttaatgtaatatttaccgtaataaatatatgtataaagatacttaaggcgcccttgagtgataaattatctaatttctatcatgcattttgtcaatgaatgatagaaagacagcaggaggaattagcttttgaagtacgcatttgcatataaaaatcacaatatagaaacgatcttttgcggaaaagacgagctgtttgaggaactgaagcaatttttaatcactcaatgcggtttaatcatcgttgaggtttcaagggctgattactatacggagcaggaaatgaatcagtggaatgaccgttatactctgtgaataagaaaagaaaccggccgtgggaggccggtttttgtatcatctgaatccgctcggagcgctgaagcccccggcatggccgctgaaaccgcccccgagcgcgccgggatgggcccctgcgccgaggcttccgccgacgtcactgaaggattggccgtagtacccggttgtataagggtacggaacgaattgctgcccggcgaatgacagcgtgctttgcggggtctgctgtccgtatccggatgacgggaatccctgctgaaaagaagggccgccttgatatggtgctgtatgcatcggggccggaggatagtaagactgcggcggtaagaccggtaaaggcggaaatccaggaggcaggccctgcatgcctgataacatcttattcatgacatcactcatttcttacgagataagaacagtgtatgcgtatgtctgtagaaagagcctgttcaatcgaacggaatatctgacaagcatgccggaaggacagagaaaaatcgtgtaataaaatgtgacatattcgtatatgaacggaaaaatttcatgtaatcttgagagattaataaaaaaatgataaaaacttttaatatttacagatccctttgtaccagtaatgaaagcgtatacaaagtagattgattaatctaaattgtctaataattataaaaatgctgttgacactgtctgcaaacgggcgtaatatgagttcaaacaaaaataaataaatgattcacgctaaaaagaaaaatcataaaacactgaaaaaacaaacaaatgaaggttcttttttaataaaagagctgccataataaaaagcgcagaagaggataagtagctttgctgaagtttttcacagagagccggtaacgctgagagccggtaaaacaaatcaaagtgaactcccctcagagtgccggtctgaaatgtaaagagtaggactcggccgagtgaacacaatgtttactcgttatcaaaacggataatcattatccatgagacggtctgcatatgaccgtaaacaagggtggtaccgcggaaagcaaagccttttcgccccttttggctatcgcatgaaatgcttggctgaatgtgggtgggaaggcttttttatttgcgtcagccggcgctgcgttttatgaattggattttagaaaggaacattgaaaaggaggaactgaaaatgggcacaaatgtacaggcggattctttgtctgccgaatgtacaaaaacaatgaacggggctctgatgctgattgaatcattaaagaaagaaaatgtcgagatgatcttcggctatccggggggagccgtccttccgatttacgataaactgtatcaatcaggattggttcacatcctgccccgccacgagcaaggcgcgattcatgcggcagaagggtatgcgagagtctccggaaagccgggggttgtgattgctacttccggacccggagcgacaaatttagttaccggtcttgcggatgcgatgattgattcattgccgctcgtagtgtttaccggtcaggtggccacttcggtcatcggcagcgacgctttccaggaagccgacattttaggaattacgatgccgattacgaaacacagctaccaagtccgccgtccggaagatctcccccgtgtgattaaagaggcgttccatattgccacgacgggaagaccgggcccggtattaattgatataccgaaggatgtcgcagcatttgaaggagagttcagatatgatcacgagatcagccttccgggttatcagcctgtaaaagagcctaactatctgcagatccgaaagctcgtggaagctgtcagcagtgcgaaaaagccggttattttagccggagcgggtgttttgcacggtaaagcttcagaagatttaaaaaattatgctgaacagcagcaaatcccggtagcgcacacgcttctcggtctgggcggtttcccggcagaccatcctctttttctgggaatggcggggatgcacggcacatacacagcgaatatggcgctttaccactgtgatttgttgatcagcatcggagcgcggttcgatgatcgtgtgaccggaaatctgaagcattttgcaaaatcggccaaagtagcgcatatcgatattgatcctgctgaaatcggaaaaattatcgaaacgcagattccggtggtcggcgacagtaaaatcgtccttcaggaattattgaagcaaaacggaaaacagggacagacagaggaatggaaacagcagctttcagaatggaaagaagaatatccgctttggtatacagacaacagagaagagggcttgaaaccccaaaagctgattgagtatattcaccaattcacaaacggtgaggcgattgtggcgacggatgtcggccagcaccagatgtgggcggctcagttttatcctttccgaaaggctgataagtgggttacctcggggggactaggcacaatgggcttcggccttccggcggctatcggagcgcagctggccgatcgtaacgccacggtcgttgccatcctcggagacggcggttttcagatgacccttcaggaattagatgtcatccggcagctgaatcttcctgtcaaagtggttatcttgaacaacgaatgtctgggcatggtcagacagtggcaggaaatcttctatgaagagcgctattctgaatccaaattctcggcgcagcctgactttgtcaaattgtcagaagcctacggcattaaaggcgtccggatttcatcggaggaagaggcggaagaagagcttaaaaaggcgctttcatcaaaagaaccggccgttattgacgtccgggtcgccaaaagcgagaaagtattcccgatgattgcgccgggtaaaggacttcatgaaatggtgggggtgaaaccttgaaacgcattatcacattaacggtggtcaaccgctcgggagtattaaaccggatcaccggcctgtttacaaaaagacactataatatcgaaagcatcactgtaggccacacggaaacaagcggtgtttcaaggattacatttgtcgtccatgtggaaggcgaaaatgacgtagagcagctgacaaagcagcttaacaaacaaattgacgtcctgaaagtgacggatattacaaaccaatcgattgtacagcgtgagctggcattaatcaaagttgtttccgcaccgtcggccagaacggaaatcaatggaatcattgagccgttcagagcttccgtcgttgatgtctcaagagacagcgtcgtcgttcaggttaccggcgaatctaataaaatcgaagcgctcatagagctgctcaaaccctacggcattaaagaaatcgcgagaacgggcacaacggcttttgcgaggggaacccagcagaaggcgtcatccaataaaacaatttcaattgtataacacaaaaaagggagagattaaaatggtaaaagtatattataacggtgatatcaaagagaacgtattggcaggtaaaaaagtagcgattatcggttacggttcacaaggtcacgcacatgcgctgaacttaaaagaaagcggaattgatgtcattgtcggcgtcagacaaggaaaatcatttacacaggcccaagaagacggtcatcaagtcttttcggtaagagaagcggctgcccaggctgatatcattatggttcttcttccggatgaacagcagcaaaaagtatatgaagctgaaatcaaagatgaattgacggcgggcaagtcattagtattcgcacacggatttaacgtccatttccatcagatcgtgcctcctgctgatgtggatgtattccttgtcgcccctaaaggaccgggacaccttgtcagaagaacatatgaacaaggcgcgggcgtaccggcattgtttgccatctaccaggatgtatcaggcgaagcgaaagatacggctcttgcttatgcaaaaggaatcggcggagcgcgtgcgggcgttcttgaaacaacatttaaggaagaaacggaaacggatttgttcggtgagcaggccgttctgtgcggaggtttaacggcgcttgtcaaagcgggttttgaaacgctgacagaagccggctaccagcctgaactcgcatacttcgagtgtctgcacgaactgaagctgatcgtagacttgatgtatgaagaaggattggcgggcatgagatactctatctctgatacggctcaatggggagattttgtctcagggccgcgcgtagtcgatgcgaaggtaaaagaatcgatgaaacaagtattaacggatattcaaaacggtacattcgcgaaagaatggatcgtggaaaaccaagtgaaccgtcctcgtttcaatgcgatcaatgcaagtgaaaacgagcatcagattgaaaaggtcggcagacagcttcgtgaaatgatgccgtttgtcaaacaaggcaaaaagaaggaagcggtggtctccgttgcgcaaaattaatgttttcgacacgacccttcgtgacggtgaacaatcccccggggtcaacctcaattcccgggagaaactggcgatagccaagcagcttgaaagactcggggtggacattattgaagcgggatttcccgcttcatcccgaggtgattttttagccgtgcaggaaatcgcaagaacgattaaaaattgttcggtaacagggcttgcccgatctgtcaaaggtgacatcgacgcagcctgggaagcactgaaagacggggccagcccgcggattcacatctttatcgccacttctgacattcatctgaagcataagctgaaaatgacgcgggaagaggttaaggaaaaagcggttgaaatggtgaagtatgcaaaagaacgctttccgatcgttcaatggtcagcagaagacgcatgccgcaccgaacttccgtttctggctgaaatcgttgaagaagtgattgatgccggcgcgagcgtcatcaacctgccggacactgtaggttacctgacgccggatgaatacggaaacatctttaaatatatgaaggaacacgttccgaatatcagccgggtaaagctttcagcccattgccacgatgatctcggaatggcggttgccaactcgctttcggcaattgagaacggcgctgatcaaattgaatgcgccattaacggcataggagaaagagccgggaacgccgcgctagaggaaatcgccgttgcgcttcatgtcagaaatgacgcgcatcaagccgattcatctcttaatcttcatgaattgaagcggacgagtgatcttgtcagcaaactgacgggtatggccgttccccgcaacaaagcaatcgtcggagataacgctttcgcacatgagtccggcattcaccaagacggtttcctgaaagaaaaatcaacatatgaaatcatttcgccggaacttgtcggcgtgactgctgatgcgctcgtactcggaaagcattccgggcgccacgcgttcaaagaccgcctgaatacgcttggattccagtttgatagtgaggaaatcaataaattttttacgatgtttaaagaactgaccgaaaagaaaaaagaaatcaccgatgatgacttgatttctcttattttagaagaaaaagtgacagacaaaaaaatcggctatgaatttttgtctctgcaagtgcattacgggacgtctcaggtgccgactgcaacagtctctttaaaaaatcaggaaaacgaacagctgattcaagaggcggcaacgggggcgggcagcgtagaagccgtttataatacgctcgggcgctgcatcgataaaaatattgaactgacagactaccgcatccaatccaaccggaaaggcgaagacgcgctggctcaagtttttgtcagagtgaccgtgaacggaaaagaaacatcagggcggggaatcgcgcaggatgttctggaagcttctgctaaagcttatctgaacgccgtgaaccggcaattggtgctggattgcaatatagacggattaaagagacagactgcggtcggctcgtaatagaaaggagaacgtttgatttgaaaaaacgcattgctttgctgcccggtgacggaatcggaccggaagtggcggaatcagcggcagatgtattgaaaagcgttgccgaacaattcggacatgaatttgaatttgaaaacggactgatcgggggagcggctattgacgcccaccaaaacccccttcctgaggagacggtggctctttgtgaaagatccgacgccatcctgctcggggcagtcggcgggccgaaatgggaccaaaatcctccggagctcagaccggaaaaaggcctgctcggcatcagaaaaaaactcggcctgtttgccaatctgcgtcccgtgaccgtatttgaaagcttgtctgaggcgtctccgctgaaaaaagaatatatcagcggcgtcgactttgtaatcgtcagggaactgacgggcggcctctatttcggagaaccgagcagacagtatgtcaatgaagcgggagaaaaggaagcggtcgatacccttttttataagaaagaagaaatcgcacgcgttgtcagagaagcctttaagatggctgccggcagaaaaggaaaagtgacgtccgttgataaggcgaatgtgctttcttcaagcaggctgtggcgtgaaacagcggatgaaatcgcaaaagaatttcctgatgtgacgcttgaacatatgcttgtcgataatgccgcgatgcagctcatctacgctccgagccaatttgacgtcatcgtaactgagaatatgttcggcgatattttaagcgatgaagcctccatgctgacaggctcgctcggcatgctgccgtcagccagtttatcaagttcaggtcttcacttgtttgaacccgtgcatggatctgcgcctgacatcgccggtaaagggatggcaaatccgtttgcggcgattttatcagcggcgatgcttttgagaacatctttcgggcttgaaaacgaagcgcaggcggtggaaaaagcggtcgcaaaggtgcttgcagatggcagccgtacacgtgatatcgcccgggacggccaatatgccggaacgcatgacattactgaaaaagtaaaagccgcattagccggctcgaatacaaaatctatagtgtgacgctttaaagaaagcggtcttagttcataggtagagggaggaaacaaagatgatgcctcgaacaatcatcgaaaagatttgggatcggcatgttgtaaaaagcggtgaaggaaaacccgaccttctctatattgatctgcacctcattcatgaggtgacgtctcctcaggcgtttgaagggttaaggcagaagggaagaaaggtcagacggccgcagaacacattcgcgacgatggaccacaatattccgaccgtcaaccgttttgacattaaagatgaagtcgcaaagcgccaagtaaccgcgcttgaacggaattgcgaggagttcggcgtccgtcttgcggatcttcacagcgcagaccaggggatcgttcacgtagtcgggcctgagcttggtctgacactaccggggaaaacgatcgtttgcggagacagccatacatcgactcacggcgcattcggagcgcttgccttcggtatcggcacaagtgaggtggaacatgttctttccactcagacattgtggcagcagcggccgaaaacgcttgaaatccgcgttgacggaacgctccaaaaaggagtgaccgcgaaggatgtcatcttgtcggtcatcggaaaatacggggtgaaattcggtaccggatatgtcattgaatacaccggggaagtattcagaaacatgtctatggacgaacgcatgacggtctgcaatatgtcaatagaagcgggagcgcgggcgggactgatcgctccagatgacacgacgattgaatattgtaaaaaccgtaaatacgcgccaaaaggcgaggaatttgaaaaagccgccgcagaatggaaagcgttaaaaaccgatccgggcgccgtatacgatcattccatcgtgttagacggcagcgagatttctccaatggtaacatggggcgtcaatcccggtatggttcttccggtcgatgcccaaataccggcgccggaaacgattgattctgaagacggtaaaaaagaagccatccgcgcgtacgaatacatgggaatcgcaccgaatcaaaaaattgaagatattaaagtcgagcatgtgtttatcggctcctgtacaaattcgcggatgaccgatcttcgccaggctgcggatatgatcaaaggccgaaaagtcgccgacagcgtcagagccattgtggtgccgggttctcaaagcgtgaaacagcaggccgaagaagaagggctgcaccgcgtgtttctcgaggccgggtttgaatggagagaatcaggctgcagcatgtgcctcagtatgaacaatgatgtcgtgcctgaaggggaacgatgcgcttccacttccaaccgcaacttcgaaggcagacagggaaaaggcgcgagaacacatcttgtcagtccggcgatggcggcaatggcggccattcacgggcatttcgtcgatgtaagaaagttttatcaagaaaaaacagttgtgtaaggagtgcgcgaaaagatggaacctttaaaaacgcatacgggaaaagcggccgtcttaaaccggatcaacgtcgatacggaccagattattccgaaacagtttttgaaaagaattgaaagaacaggatacggcagattcgcgttttttgattggagataccttgagaacggtgagcctgatcctgaatttgaattaaaccgcaaagtctatgaaggcgcgtccatattaattgccggagagaatttcggctgcggatcatcccgtgagcacgctccttgggcgctggatgattacggcttcaaaatcatcattgctccgtcatttgccgatatttttcatcaaaactgttttaaaaacggtatgcttcccatccgtatgccgtatgatcagtggaaaaaactcgccggtcaatatgaaaatcagtctcttaacatgacggttgacttggaaaaccagctcattcacgacagtgaaggaaaagagatttcatttgaagtcgatcctcactggaaggaaatgctgataaacggctatgatgaaatttcattaacgcttctgctggaagacgacatacagcagtttgaatcgaaaagaagttcatggcttcaagcctgaaaaaagccgaccggcatctgtccggcggctttttttaccgtgcgcaccatcctttcttgtgtttcctgacgcgtgttgatacacttgaaaaaaatagcgcctgaaaggaaataaagtatgacgcatgacaagaaaaaagctgatatcattcctttcccccgtctgaaagaacgcttggttgataaagggatggccgccatgaaggataaacagtatcaggaggccctcgaactgttctcagaggcggtaagccacggcgataccgagtccgacgtacatttaggcatggcgatttgttttctggaactcggggaattggaagaagcaaaacaagtttgcgagaaaatgctgaatgaagggtacggccattatttcaccgtactgcaggtgtacatgaccattttaattcagctgaaacaatatgaagaagtcaaaagcacaattgaagctgtgctggaagaaaaccagctgcccgcagaaagtgcggagcaattctaccggctgctcgaattcagccgcaaaatgaccgatcccgaccagcaggatgaagcgtgggaggaggaatacgaggacattcttgatgcggaaaaagtgctgaacagccccgctgaacaaatgaatctgattcattctctcaaagaccgcaatattgcaaaatacacgggtctcttaaaaacgattcttcaagatccgggcgcacatccgcttatcaaaacgatgattttgacgctgatggcggagcacgactacagcaagccggtccatattacaaaattcggcgattcaatgaccgcggttccgagtgaaacggttcagcctgatgcggctccgattttgcatcgcgttctccgggtgcttgatgaaacgctcggcaatgaaaaccctacattatacgctgccgtcgaggagctgtggagaaggcatctgtacgtcctgcacccttttatgccgaagtttttgaacgcagatttatgggcggcggcgcttcataaggtcggttacgagatgcacggcattgacattgagccggaggaacttcatatgatgtacgagtttgacagccgcgaacttgaagaagcctgcacgatgattaaggatattgaagaaatttcttatttgtaaatcacaccatatagttgaaagcggtaggcgttatgttataatatagtggttgtatttatgtatagcggtttaactgaaatgagaattacggttggacaggctgccagttcattacataatgattctgattcaaagcggttttttctttgacaaagccgcggattgctttagaatggaagaccgacacaacctgaatagatttttggagggaaacacatgtctgtaaaatgggaaaaacaagaaggcaacgaaggcgtattaacggttgaagttgatgcggatacgttcaaaacagctcttgatgatgcatttaaaaaagtagtaaaacaggtttctattcctggattccgcaaagggaaagttccccgcggtttattcgaacagcgtttcggcgttgaagctctttaccaggatgctttagatattttacttcctgtagaataccctaaagcggttgaagaagccggcattgaacctgtagaccgccctgaaatcgatgttgaaaaaatcgaaaaaggcgaaagcttgattttcactgcaaaagtgactgtaaaaccggaagtgaaacttggcgactacaaaggcttaggaatcgaaaaagatgacactgccgttactgacgaagatgtacaaaacgaacttaaagcgcttcaagagcgtcaggctgagcttgtcgtgaaagaagaaggcgctgttgaaaacggcgatacagtcgttcttgacttcgaaggtttcgttgacggcgaagcgtttgaaggcggaaaagctgagaactactcacttgaagtaggatcaggttcattcatcccgggcttcgaagagcagttaacaggccttgaagcaggcgctgaaaaggatgttgaagtaacattccctgaagagtaccacgctgaagagcttgccggaaaaccagctgttttcaaagtgaaaattcatgaaatcaaagcgaaagagcttcctgagcttaacgacgaattcgcaaaagacattgacgaagaagttgaaacgcttgctgaattaactgagaaaacaaaaaaacgccttgaagaagcaaaagaaaacgaagctgacgctaaattgcgtgaagagcttgttctgaaagcatctgaaaacgctgaagctgatgttcctcaagcgatgatcgacactgagcttgaccgcatgctgaaagaattcgaacagcgtctgcaaatgcaaggcatgaaccttgagctttacactcaattctcaggccaagacgaaaacgcgttaaaagagcaaatgaaagaagatgccgcaaaacgcgtaaaatcaaacctgactcttgaagcgatcgctcaagctgaaaaccttgaagtaacagacgaagaagttgaagctgagctgactaaaatggctgaagcttacaacatgccggttgaaaacattaagcaggcaatcggttcaactgacgcgatgaaagaagatttaaaagttcgaaaagcaattgattttcttgtagaaaaccgttaatatggttcataataatagacataataaaacagggcgcgattaattcgtgccttgttttgtacaattatgatataactctttttcttggggcaagatagtcattgccgggctgtttttcgtcatacatatagaatgtgcaagtgcgaaacacattgttaccgtcttactggaaagtatggtaaaatgcaatacatactcgatcgtagcaagaaccgttttcttttgcccttcaggtaaaagaaaaagtgagacaagattaaggggtgaaagaatgtttaaattcaacgaggaaaaaggacaattgaaatgctcgttctgcggaaaaacgcaagatcaggttcgtaagctggttgcaggaccgggtgtatatatatgcgacgaatgtattgagctctgtacagaaatcgtagaggaagagcttggtacagaagaagaagtcgaatttaaagacgttccgaagccgcaggaaatccgtgagattctgaatgaatatgtcatcggacaggatcaggcgaagaaatcacttgcggttgcggtatacaaccattacaaacgcatcaattccaacagtaaagtggatgatgtcgagctttctaaaagtaatatttctttaatcggaccgactggaagcgggaaaacacttcttgcccagacgcttgcgcgtattctgaacgtgccgtttgcgatcgcggacgctacatctctgactgaagccggatatgtcggtgaggacgtggaaaacatcctcctcaagctgattcaggcagcagactatgatgtggaaaaagcagaaaaaggcattatttatatcgatgaaatcgataaagtagcgcgaaaatctgaaaacccgtccattacacgcgacgtatcaggcgaaggcgttcagcaggcgctgctgaaaattcttgaaggaacggttgcaagcgtgccgcctcaaggaggacgcaaacatcctcatcaggaattcatccagatcgatacgacgaacatcctgttcatttgcggcggtgcatttgacggcatcgaacaaatcatcaaacgccgtctcggacaaaaagtcatcggcttcggctctgataataaagcggcagacctggaaaaagaagaactgctttctaaagttcttcctgaagacttgctccgtttcggtctgattcctgaattcatcggccgtcttcctgtcattgcaagccttgagcagcttgacgaaacggcactggttgaaattctgactaaaccgaaaaacgcactcgtcaaacaatacaagaaaatgttagaacttgatgatgtcgagcttgaatttgaagacgaggcattatctgaaattgcgaaaaaagcgatcgagcgtaaaacaggcgcacgcggcctgcgttctatcattgaaggcatcatgcttgacgtcatgtttgatctgccgtcccgcgatgatattgaaaaatgtgtcattaccggagcgacagtcgcagatggtgaagcaccgcgtcttgtattaaaagacggcacagttgtcggccaagataaaacatcagcataacatgacaaaacctcctgactcgaattgatcaggaggttttttttcttgtcctgacccttctgaaaatgtttattccgggctttgctgggagatactagcggacagaggaatgaattggatacataaatcgttttttcaggagggaccagcatgagttggacagggatcgcattatttgtacagctgtttttcgggatagtcatcggattatatttttggaatctgctcaaaaaccagcgtacacaaaaagtgacgatagataaagaatcaaaaaaagaaatggaacagctgcgcaaaatgcgcgccatcagtttatcagaacctttatcagaaaaggtgcggccgaaaagctttcaggacattgtcggccaggaagacggaattaaagcgttaaaagcagcgctttgcggaccgaacccgcagcacgtcattatttacggtcctccgggagtcggaaaaacggctgcggcgcggctggtattggaagaagcgaaaaaacataaacagtcaccgtttcaaaagcaggctgtttttgttgaacttgatgcgacgaccgcgcggtttgatgaacgggggattgccgatccgcttatcggttcagtgcatgatccgatttatcagggagcgggagcgatgggccaagcaggcattccgcagccgaaacagggggctgtgacccatgctcacggcggggtattgtttattgatgaaatcggcgagcttcatccgattcagatgaataaaatgctgaaggtgcttgaagatcgaaaagtatttttagacagtgcgtattacagtgaagaaaatacgcaaataccgaatcacattcatgatatttttcaaaatgggcttccggcagatttccgtttgatcggagcgacaacgagaatgccgaatgaaattccgccggccatccgttcgcgctgtcttgaagtatttttccgcgagctggaaaaggatgaacttaaaatcgttgcgaaaaaagcagccgacaaaattcagaaagagatttctgacgaagctctcagtgtgctgaccacatatacgagaaacggacgtgaagccgtcaatatgatccagatcgccgccggcatggcggtgactgaggacagaaaagaaattacgacagaagatatagaatgggttgttcattccagtcagcttacacctaaaaatgagcagaaaatcgccgatgaaccgcaagtcggcatcgtgaacggacttgccgtctacgggccgaacagcggcgcattgctggaaattgaagtgaatgtcacacctgcgcaggacaaaggaagcctgaatatcacgggaattgcagaggaagaaagcatcggcagccaatcgaagtcgatccgccgcaaaagcatggcgaagggatctgtagaaaatgttctgacggttctgcgcacaatgggcatcaaaccttcagactatgacattcacgtcaattttccgggcggaggcccgattgacggaccttcagcaggtatcgcgatggccgcggggattttttccgcgattcaccgcatcccgatcgaccatacggtggcgatgacgggagaaatcagcctgacggggcttgtcaaaccgatcggcggcgtcattccgaaaattaaagccgcaaaacaggccggagcaaaaacggtcattatcccatatgaaaatcagcagtccattctgaaacgaatagacggaatcaccattaaagcggtaaaaacgttccaggaagtgctggacgtcatattggttgaccctccttcagaacaaaaaccgtttgatatccaaatgaataaagaatccgtataaaccccatttttataatggggtttttttatggaggacatcttttcctttttcagaacagaaagaaagggtatactacgaagagactgttttatatacagggcaggcggataagccggttttgcccgatcccggaattgtacaacgatgaaaaagttgtattataatggttcatactaaagtcacggaggtgtcagtcacatggcagaagatacaaaacgcagcatcccgctcctccctttaagaggcttattggtatacccgacaatggttttacatttagatgtaggccgtgacaagtcggttcaggctcttgaacaggcaatgatgcatgatcatatgatttttttagccactcagcaggatatttcgatagacgaaccgggtgaagaggatattttcgccgtcggcacttatacaaaaattaaacagatgctgaagctgcccaacggtacgatcagagtgcttgtagaaggaattcagcgggcgcagatccttgaatacaccgagctcgaagattatacttcggtcgatatacagctgatgcatgaggatgattcaaaagacgtggaagacgaagcgcttatgcggacgctgctggaccattttgaccagtacataaaaatttctaaaaaaatctccgcagaaacgtatgcggctgtgactgatattgaagagcccggcagaatggcggatatcgtcgcttctcatctcccgctgaaattaaaggacaagcaggacattttagaaacggcggatattaaagaacgtctgaataaggtcatccgctccattcataatgaaaaagaagtgctggagattgagaaaaaaatcggccagcgcgtcaaacgttcgatggaacgcactcaaaaggaatactacttgcgtgaacagatgaaagccattcagaaggagcttggcgacaaagaaggaaaaaccggcgaagttcagtcgctcacggaaaagatagaagaagcaggcatgcctgagcgtgtcaaagaaacggcgcttaaggaattaagccgttacgaaaaagtgccgtcaagctcagcggaaagctctgttatccgcaactatattgactggctcatcgcccttccgtggtcggatgaaacagaagataaacttgatattaaaaaagccggggaaatcttagataaagagcaccacggcttagagaaagtgaaagagcggattttggagtatttggccgtgaaacagctgacgaaaacgctgaaagggccgattctttgtctggccggacctccgggagtcggtaaaacatctcttgcaaaatcaatcagtacgagcatggggcgccgttttgtgagaatttcactgggcggagtgcgcgatgagtctgaaatccgcgggcaccggcgtacatacgtcggagcgatgccgggccgtattatacaggggatgaaaaaagccggcaaacaaaatccggtttttctcctggatgagatcgacaaaatgtcgtctgatttcagaggcgatccgtcttcagcgatgcttgaggtgctggatccggaacaaaacagcacattcagcgaccactatattgaagagacgttcgatttatcgaaagtgctgtttatcgcgactgcgaataaccttgcttccatcccgggccctctcagagacagaatggagattatcagcctgtcaggctacactgaaaacgaaaagctggagatcgtgaaggaccacctgcttccgaaacaaatcaaagagcacgggctcacaaagagcagcctgcagattcgggaccaggcgattacggacatcatccgctactacacgagggaagccggcgtgagaacgcttgaacgccagattgccgccatttgccgaaaggctgcaaaagccattgtgtctgaggagagaaaacgcattaccgttacagagaaaaatctggccgactatctcggaaaacggatattcagatacggacaggcggaaaccgaagatcaaatcggggttgtcacggggcttgcgtatacgacggtcggcggagatacgctgtcaatcgaagtgtcattgtcaccgggaaaaggaaagctgattctgaccgggaagcttggagatgtcatgcgggaatcagcacaggccgctttcagttatgtccgctcgaaagcggaacagttcggaatcgacccgaaattccatgagaagtatgacattcatatccatgtccctgaaggagcggtgccgaaagacggcccttctgccggaattacgatggccacggcgctcgtttcagcattaacggaccgtgcggtaaaacgcgaagtcggtatgacgggagaaattacgctgcggggccgcgtgcttccgatcggcggactgaaagaaaaggcgctcggcgcgcacagagcgggcctgaccactattattgcgcctaaagataacgaaaaagatatagaggatattccagaaagcgtcagagaaggactgaagtttatattcgtttctcacctggatgacgttttggaacatgccttagtaggagagaagaaatgaaagtcacaaagtcagaaatcgtgatcagcgcggtcaaacccgaacagtaccctgatggggggcttccggaaatcgcgctggcgggaagatcaaatgtaggaaagtcatcttttatcaattcattaatcaatcggaaaaacttggccagaacgtcatcaaaaccggggaaaacacagaccctaaacttttacatcatcaatgatgaattgcattttgtcgacgttcccgggtacggatttgcgaaagtttccaaaagcgagcgggaagcatgggggagaatgattgaaacctatatgacgacccgcgaagagctgaaagcctgcgtgcagattgtcgatctcaggcacgcgccgtctgctgaagacgtgaacatgtatgaattcctgaagtattacggcattcccgtcatcgttatcgcgacaaaagcggataagattccaaaaggaaaatgggacaagcacttaaaggttgtcaaacagacgcttgatatggatcctgaagatgagctgattttattttcctctgaaacgaaaaaaggcaaagatgaagcatggggagccattaaaaaaatgatcagccggtaatgaaaaacccaaaacgcagtgcgttttgggttttatcgtatagttttgttccgcttgataaacaataataaaaggctgattccgatgaaaacatacggccagtatgttttgaagtgttccgtcggaatatggacggactccagccacgccgtaatttgtttaaagaagtataaaaagagggaaaaaccaatcatggcaaccgcttcgtatacatattcttttctggctgccgcaaataaggagaacccgaagacgaagagaatcatttcaaaatctcccggccaccatgagagctcaggtttggcgaaaaagtgtaaacctatgccgaaaagaagcatgccgatcaggacgtgaggcccggccgcttcctttttgccctgatacaagagcacagcgcccaaaagcataaggagcaccggccattccccctgattcgcaaacaggtgaacctgtccgctctgaagccatgcgaataatgaagcggcaagcagaagtcccggtaataaaattgatgtttttttcatcctgtcacctacccgcagtaaaggatttttagtatgatgattacagtggaaacgagctttttatactatagcataacatttttgaaatctgttcacattttcccgaagaaactatgttataatcattataaataataaattctatgttagaatgattataaataaattgcgatgtacgggggtgcatgaaagcgatgcatattcttgttgtgggagtagattataaatccgcccctattgaaatacgcgaaaaaataagttttcagccggatgagcttgcagaagcgatgctccgtttaaaaggagaaaaaagtgttcttgaaaacattatcgtgtcaacctgcaaccgcaccgaaatatatgcggtggtcgaccagcttcataccggccgttattatataaagacatttttatccgaatggttctcgctgccgaaagaagagctgtctccgtttctgaaattttatgagagcgacgcggcgatcgagcatttattccgtgtggtgtgcggcttggattccatggtcatcggggaaacgcaaatactcggccaggtccgctcaagctttaaaacggcgcaggcagagaagacgatcggcaccgttttcaatgagctgtttaaacaggcggtgaccgtcggcaaacgcacgcatgccgaaaccgatatcggcgccaatgccgtttccgtcagttacgccgccgttgaactcgcgaaaaaaatcttcggctcattgtcaaataagcacattttgattctcggtgcgggaaaaatgggcgagctcgccgcagaaaacctgcacggtcagggcatcggcaaagtaacggtcatcaacagaacgtttttgaaggcaaaagcgcttgctgaccgtttctccggagaagcgcgcagcttaaaccagcttgaacatgcacttgctgaagctgatattttaatcagttcgacaggcgcaagtgatttcgtcgtgtctaaagaaatgatggagagagcgggcagacagcggaaaggccgcccgttatttatggtggatatcgctgtgccgagagatctcgatccggcgctgaacgatcttgaaggtgtttttctgtatgatattgatgaccttgaaggaatcgttgaagccaacttacaagaacgccgtgaaaccgctgaaaaagtcgagctgtttattgaagcggcaattgttgagtttaagcagtggcttaatacgctcggcgtcgtgccggtcatttcggcgctgcgtgaaaaggcgctgtccatccagtccgatacgatgcagagcattgagcgcaagctgcctcatctgacggtaagagagaaaaaacttctcagcaaacatacgaaaagcatcattaaccaaatgctgcgcgacccgattctgaaagcgaaagagcttgcggctgaagcggattcagatgaaaagctgaagctgtttatgcagatattcgatattgaggaagaggccggccgccagctggacaaaagcctggataaccgccagacggttcattcgtttcaaaaggcagaagcaaaaacgggcttacgtccgcttgtaagtgagtgagggctgtatgattgatacagcaatggcaagacttaatgaagcgacaattgttatttatgcagtaagcgtccttttttactttatagattttcttcaacacaaccggaaggctgggaaaatggccttctggttgctttctattgtctggactctgcaaactgtctatctttcttatttcatgtggcagacgggcagatttccggtcttgaatattacggaggccctttacttttatgcgtgggtgcttgtcacgctctcacttgtggtcacgcagattctgcgcgttgattttatcgtgtttttcacgaatgtcatcggtttctcgatgattgcgatccatacgttttcaccgacggatcagcattcggccgctttttccggccagctggtctcggagcttttggtcattcatattacaatggcgattctgtcttacggcgctttttccctttcttttgtcttttcgcttctttatcagtttcaatactctttattaaagaagaaaaagtggggaaaatggctgttgagaattgaagatttgtcaaaacttgattatatggcttacgttttaaatgtcatcggggttccgatgctgctgttgagcctgatattaggcgtgatctgggcgtatgtgtcgctggaaacgctgtactggtttgattcaaaagtgctcggctcgtttattgtgctgcttttatacagctactatttatatatcagaatgattaaggaactgcagggaaaagtggcggcgttatggaattcagcatgttttctcgtgctgatgattaattacttcctgctcggaagcctgtcgcaattccattggttcagttaacgcacgcgcccaaacagattcgggaggaaagaaaatgagaacgattaaggtaggttccagacggagcaaactggctatgacccagacaaaatgggtgattaacaaactgaaggaattgaacccttcctataactttgaaatccgggagattgtcacaaaaggcgaccgcatcctcgatgttacactgtcaaaagtgggcggcaaaggtttgtttgtcaaagagattgaacaggcgctgctgcatcaggagattgatatggcggttcacagcatgaaagacatgcccgccgttttgcctgagggtcttgtcataggatgcataccgaaacgtgaggatccgcgtgatgcgctgatttcaaaggggcatcaaaagctggacgacataaaagaagggggcatcatcggcaccagcagtttaagaagaagcgcccagattcttgctgaacgccctgatcttacaattaagtggatcagaggcaatatcgatacgagacttcaaaagcttgaaacggaagattacgatgctattattttagcggctgcgggactttcaagaatgggctggaaagatgatgtcgtatctgaatttctcgaaccggcccgctgtctgcctgcggtcggccaaggcgctcttgccattgaatgcagagagtcggatgaggagcttttgaagctgtttgcgcaatttaccgatgagtatacgcagcgcacggtggcagccgaacgggctttcttacacgcgatggaaggcggctgccaagtgccgatagccgggtatgcgtccgtcaatgaccgggatgaggttgaattggtcggtcttgtcgcgtctccggacggaaagacgatttataaagaaacagcggcgggacatgatccggaagaaatcggtaaacgctgtgcggcgatgatgtctgaaaaaggagccaaagcactaatcgacagcgtaaaacaggagctcgatcaggatggcaaatgaccttcctttacaaggaaagaccgtgcttgtcactcggaacaaaagacaggccgctccgttccgaaaaaaagtggaggcgctcggcggaacggctgtttccgcttcgctgatcgcttttcaggaagcgctcccggatgaatgtgcggacagtctgcgggaagacctttctgagccgggatggcttgtgtttacaagcgtaaacggtgtccggttctttttttcctatcttgatcgtcacggtcttgcgctttcgggacggaaaaaaatcgcagccgtcggtgaaaagactgcgcgcgccctgaaagagcggggagcccggacggatgcgatgcctgacgagtatgtggcggaatgtctggctgatactttaaaacggcacgcatcagctgccgaacccatttcagtgataaagggcaatttatcacgcgatgtcataaaagcggagcttgagccgcttggctatcaaataagggaatgggtgttatacaataccattcaggatgaaaaaggcatggacgagctgagacgggctgcatcccgctctcattttgattttattacgtttaccagctcatcggcggtgcatacgtttatgcacgcggtcggagacggagaaaaagcgtgggaaaacagcggtgcgagctatatcagcatcggccctttgacagagaaagcgctcttggaatacgggatctcatcccatgtgcctgacacttatacgattgaaggcatgctggacgtcatgtgcagcatgtcgggaaaggattgataatgatgaatcaaacatttaacagacaccgccgtttgcgctcgaacgctgcgatgagagatttagtaaaagaaacacgtcttcacccctcagattttatttacccgttatttgtcgttgaaggactcgaaggaaaaaaagaagttccttccatgccgggggtttatcatgtatcacttgatttgttaaaggatgaaatggctgagctgatatcgctcggcattaagtcggtcatcgtttttggcgtgccggaagaaaaagacgcctgcggaacccaggcttttcacgatcacggcattgtgcagaaagggattgctgaaattaaaaagcattatcctgaaatgatcgtaatcgctgatacgtgtctctgtgaatacacggatcacggccattgcggcgtcgtgaaagacggagaaatcctcaatgacgagtcgcttgaactgctggctcagacagccgtcagccaggccaaagccggcgctgacatcatcgctccttcaaatatgatggacggttttgtcacagtgatcagggaagcgctcgacaaagaaggattcacgaatattccgatcatgtcttatgccgtaaaatattcaagtgaattttacggtccgttccgcgacgcggctgacagcacgccgcagttcggagaccgaaaaacatatcagatggatccggccaaccgcttggaagcgctccgtgaggctgaatcagacgcggcagaaggcgctgactttttaatcgtcaaaccgtctatgtcatacttagatattatgcgtgatgtgaaaaaccgccatcacctgccgctggtcgcatataatgtgagcggggagtattccatggtgaaagcggcagcccaaaacggctggattaaagaaaaagaaatggtgctggaaattttaacgagcatgaaacgtgcaggagccgatctgattatgacgtatcatgcaaaagacgcagcaagatggcttgctgagtaacgatttcatttgacgggagctgaggcagatgagaagctatgaaaaatcaaaagccgcttttaaagaagcgcagaaactgatgccgggcggagtgaacagcccggtgcgcgcgtttaaatcagtcgatatggacccgatctttatgcagcgcggaaaaggatcgaaaatttttgatattgacggcaatgaatatatcgactacgtcctgagctgggggccgctcattttgggccacacgaacgaccgggtcgttgaaagcctgaaaaaagtagccgagaacgggacaagtttcggagcatctactgaggtggaaaacgaactggccaaattggtcattgaccgtgtgccgtctgttgaaatcgtacggatggtcagctccggcacagaggcgacaatgagcgccctgcgtctggcaagaggatataccggccgcaacaaaattttgaaattcgaaggctgttaccacggccatggtgattcactgctgatcaaagcgggatccggagtggcgacactcggccttccggacagcccgggcgtgccggaaggaatagcaatgaatacgattaccgttccatacaacgacttggaaagcgttgcactcgcattccgggagtacggtgaagatattgccggggtcattgttgaaccggtagcaggcaatatgggcgttgttccgccgcaggaaggctttttacaaggacttcgcgacatgacggaacagtatggcgcgctgctcatttttgatgaggtcatgaccggttttcgcgtggattataactgtgcgcaagggtatttcggcgtgacgcctgacttaacgtgtctcggcaaagtcatcggcggcggtcttcctgtcggtgcgtatggcggaaaagctgatattatggaacgaatcgcgccgagcggtcctatctatcaggcgggaacattgtcaggaaatccgcttgccatgacagcgggacttgagacgttacagcagctcacacctgaatcttaccaagaatttgtgaaaaaaggcgatatgcttgaagaaggcatttcaaaagcagctgcagcacatggcattccgcacacgtttaaccgggcgggttcaatgatcggcttctttttcacaaatgagcctgtcattaactatgaagcagccaaatcatctgatttaaagctgtttgccaaatattataaagggatggctgatgcaggcgtatttctgccgccgtctcaatttgaaggattgtttctctccactgcgcatacaatggaggatattgaaaaaaccattcaagccgctgagaaagtgttccaggcgatcagccgctgatacggaaaagccgatgcaagcaagacttgtatcggcttttttcaatgcctccattatcatatttttccggattgcggcatacacctttagtgacatctaattgtatggattagatgaaaggaggatatgaacttgccgcataatcaccgattgcaattttctgttgaagaatcaatctgtttccaaaaaggacaggaagtttctgaattactttcgatttcattagaccctgacatcagggtgcaggaagtaaatgattatgtctcaattaaaggatcactagaacttactggcgagtacaacatagatcacagcagtcattttgaagagcttgatagggagctgaggcatgtagaggaagtgagggcgagggaggatggcacggccgagctcattcattgtttcccagtggacattacgattccgaaaaataaagtgagccacctcaatgatgttttcgtatttatcgatgcctttgattatcagctgacggattcaaggatcttaaccattcaggctgatttggcaattgaagggctgcttgaggaatccgagccaaaagagccggagatccctttgtacgtggcacctgaatttgccagagaagaaatgatcaatcttgccggacatcattcggaggacgaaaacgaaccagaattaatgatacgccatgagcctgaaatacctttgagtgtatcaaaagaagcagcacaagaaaccgagaagaacgaggaagaaaccccgcctttactcaggcaggaggaagaagagcaggaagcagccccgattctgagggagcgggaagaagaagagcaggaagcagccccgattctgagggagcgggaagaagaagagcaggaagctgctccgattctgagggagcgggaagaagaagagcaggaaactgccccgattctgagagagcaggaagaagaagagcaggaagcagccccgattctgagagagcaggaagaagaagagcaggaagcagccccgattctgagggagcgggaagaagagcaggaagcagccccgattttgagggagcgggaagaggaagagcaggaagcagccccgattttgagggagcgggaagaagaagagcaggagactgccccgattctgagggagcaggaagaagaagaggagcagggagctgccccgattttgagggagcgggaagaagaagagcaggaagcagccccgattttgagggagcgggaagaagaagagcgggagactgccccaattctgagggagcaggaagaggtgccgaaacctgtttcctttactgagcctcctcctcccgtttctttccaacacgaagaagagccggaagaagctgaggagcctgcaatcatgtcggctgtgaggaatgaacctgtatttgaggatgattcagcagaagtccaggaagagccaaaagatgatatcgaaaaggttttccctgcgttcactctgactccgcatgcagaaaaaccaaaaattgcggaacagcccttccttcaaaaagaagagcagccagaggccgagccgcttctccgtcagagcgatcatgaggcggcagaagacgaagatgagcctgcggtttttcaagaagagcaggcgcccgtttatcgcgagttcgttccggaacggcaggaagaggagttttacagcgctcctaagctgcttgaagaagaggctcatgatgaagaagggtttgaaattgaggtaaggaagatggcgcagccggaggaggaaaccgggaagcctctcgatttgtcttttcagttttccaaactgccgcctgaggagccggcgcaagctgaaccgcctgagccgcttaagtctgaaagaaagaatgaagaagcggcaccgggaaccgagcagaaggaaaatgacaactctcattacttgacaaaattatttacaagggaagaagaaaagttttcaagaatgaaaatttgtatcgtacagcagcaagatactatcgaccgggtgtgtgaacgatatgacataacaacccagcagctcatcagaacgaatgctttatcgtttgatgacgagcttgaagaaggtcagcttctgtatatacctgaatataataacagccatgcgtaagcacaaagaggccgtaaaaatgtggtgaatggaatggaagcagtccaatcagtgcttcaggaatacgggctggcggctgagtatattgagcctgtcagcccgcatgtttggaaggtctactcaaactacggcatttttgctttgaaacagctcaagccggcccgcagcagtgaatttacggatcttatgattgagattgaggagaaagggtaccgatcatttgtgccgatctgccgcacgtatgccggcgatttttttgcgggaagacagacggagaattcttattatttaatgccttggcttcagtacgatcaggaagaggaacgggatcaaaaacatgtttacctttttaaagaggtcgcgaagctccattctgcgactgtgcgggacatccaaatccggactgaagatatcagcggcttttatgaagcaacgaaaagagattgggaaaatgataagcttgtctatgaacaattcgccgaccgggcggaaaaagagtggtatctttcaccttttgaactgcaggctgttacgtatcttacagaaacggtttccgccgtcaatttcgctctggaacgtctggaagagtggtttgacgcggcaaaggatcatgacaagacgagagcggtgatcaaccacggcagcttatcgagccgccactttctgtataatgatgcgggatcgggctttttcacgaatttcgagaaagctgcgctgggccctccgcaaaacgacctgctcggcttttactccagaatgttcagaagctatccgaaagcatgcccggagtgtctggactggttttatacgtatcacaaatcattcccgctccgtgaagcggaaatcagcctgtttctcagctatatggcttatccgtccgccatgtacaaagtgctgaaacggtatcagaccggccaaaggggctctgaaaaagaagagtgcacgcaattattaagagcgttttggcagatgaaaaatgttgagccttttctcatgaaggttcatcagattgagcgggagaaaaaaataaaagcggaaaacgagtcctcttcataacgggactcgttttttttatatccattccaaatgcagggcgcacgctaaaaacagcaggatggcaagcagcaggacatcaaaagtcgtcggaaagaaaatcgtcctgatcccctgaaagatcgtaatcgggataatgacttgcacggatacaaggcggacctgtctggcccactgggggagcgaataagaattgaatttttttctcacgggcaattcctcctcacattcgcctttctatgtatcgtatgtaagggaaagggcggggtgcatgcccatttatgtatgacggcagcggtttttggaaaagatgattgacgaatcaaaaacacttttactataataaagaacataataaataagatcatgagctgatataaatacacctgctttgaacgggaagagtacaagaaagacgcatgaagagagagaagctactgtgctgaaaggcttcttatgctgtctcattggaaggtcgcccgggagcataatttcttgaacatacagtagagaaattcgggccgcacccgttatccgtttaagtgcatgaacaaatctgttcatgaaaaaaggtggtaccgcgaaagagcttttcgtcctttatcaggatgaaggctcttttttagttgctcagccatttctaaacatgctggagggttatcatggatacaaatgaacaaacaatgccgacaaaatatgatccgtctgcgattgaaaaaggccgctatgatttttggctgaaaggaaaatattttgaagcgggcggcgatcaaacgaaacagccatattctgtcgttattccgccgccgaacgtgacgggcaggctgcacctcggacatgcgtgggatacgacgctgcaagatatcgttacgcgtatgaaacgcatgcagggctatgacgtgctctggcttccgggcatggaccacgccggcatcgccactcaggcaaaagtcgaagcgaagctccgcgaacagggcacaagccgttatgacctcggccgtgaaaagtttttagaagaaacgtggaagtggaaggaagagtatgctgatttcatccgcagccaatgggctaagatgggactcggactcgattattcacgcgaacgttttactcttgatgaagggctgaacaaagccgtgcgggaagtattcgtcaagctgtacgagaaaggcttgatttacagaggcgaatatatcatcaactgggaccctgccacaaaaacggctttatccgatattgaagtaatttacaaagacgtacagggcgcgttttatcatttgcgctatccgttagcagacggttcaggctcaattgaaatcgcgaccacccgtccggaaacgatgcttggcgacacggctgtcgcggttcatcctgaagatgagcgctacaagcacttaatcggcaaaacggtgattctgccgattacaaaccgtgaaattccgattgtcggcgatgattatgttgatatggaattcggatcaggcgccgttaaaatcacgcctgcccatgacccgaatgattttgaactcggaaaccgccacaatttagagcggattctcgtcatgaatgaagacggaacaatgaatgaaaaagcgctgcaatataacggcatggaccggtttgaatgccgcaaaaaactcgtcaaagatcttcaggaatccggtgttctctttaaaatcgaagaccatatgcattctgtcggacatagtgagagaagcggcgccgttgttgagccgtacctgtccacacaatggtttgtcaaaatgcagccgctggccgatgctgcggttgaccttcagtcaaaagaagagaaagttcacttcgttccagaccgtttcgagaaaacgtacctgcactggatggaaaatatccgtgattggtgtatttcccgtcagctgtggtggggccaccgcatcccggcttggtatcataaagaaacaaaagaagtgtacgtcggccttgaggcgcctgaggacagtgaaaattgggaacaggattcagacgtgcttgatacatggttcagctccgcgctttggccgttttctacaatgggctggcctgatgaaaacgctgaagactttaagcggtattactcaaccgatgttcttgtaacgggatatgacatcattttcttctgggtatcccggatgattttccaaggtcttgagtttaccggcgagcgtccgttcaaagacgtgctgattcacggcttaatccgtgacgagcagggcagaaaaatgagtaaatcccttgggaacggcgtggacccgatggatgtcatcgacaagtacggagcggattccctgcgctatttcctggcaaccggaagttcaccgggacaggatctccgtttcagctatgaaaaagtggaatccacatggaatttcgcaaataaaatttggaacgcctcccgttttgcattaatgaacatggacggcatgacgtatgacgagcttgatctgtccggtgaaaaatcagttgctgataagtggatcctcacaagattgaatgaaacgatagaagacgtaacccagcttgcggatcgttatgaattcggtgaagtcggacgccacctgtacaactttatctgggacgatgtgtgcgactggtatatcgaaatggcgaagcttccgctgtacggggaagatgaagcggcgaagaaaacaacccgttctgttctggcatacgtgcttgaccagacgatgcgtcttcttcacccgtttatgccattcttaacggaagaaatctggcagcaccttcctcatgaaggcgagtcgatcacgatcagctcttggccggttccggtgccggaacatacggataaagaggcagcggcggatatgaaactgctcgttgaattaatccgttctgtccgcaatatccggagcgaagtcaacacgccgatgagcaagcaggttgagctttacattaaaacatctacggaagacattgccggccgccttgagaagaaccgttcttacgttgaacgctttacgaatccgagcacgctgaaaatcgggacggatatcactgcggcagacaaagcgatgacagcggtcgtcaccggagcggaagtcattctgccgcttgaagggctgattaacattgatgaggagatcgcccgtctgcaaaaagaattcgacaagctgacaaaagaagtcgaacgcgttcagaaaaaactcggcaacgaagggttcattaaaaaagctcctgagcatgtcattgaagaagaacgcggaaaagagaaagactacacggcaaaacgcgaagctgtccggcagcggattgcagagctgaaaggctgataaaacagcggggcggtttcctaagaaaccgccttgtcgtataaaagaggggatttcattgtttaatacgtacaaagaagcgatcagctggattcatggcagactcaagttcggcgttaagccgggccttctccgtatggaaaagctgatggaaaaactggaacacccggaaaagaacattcgcgccattcatgtggcgggcacaaacggcaaaggatcaaccgtcgcttttatccgttccgtgcttcaagaagccggttataaagtcggcacgttcacatcgccttacatcattacgtttaatgagcgtatcagcgtcaacggcacgccgatttctgatgaggaatggagaacgctcgttaatgacataaaaccgatagtcgatgagcttgataagaccgatgccggaacggtgacagaatttgaaatcattacagcgtgtgcatttttatattttgcgaagcgggctgatatcgattttgtcatttttgaagcggggctcggcggcacatttgattcaaccaatattgtgaatccgctcctgtcggtcattacaagtatcggacatgaccatatggcgattttaggcaataccatcgaggagatcgccgggcagaaagccggtatcattaaaaattccattccggttattacgggcgtcaatcagccggaagcactcggcgttattgaagcggaagccgataaaaagcaggctccgtatcagtcactatataaaacgtgcagactgtttaatgaagcggcgcttccttccggtgaaagcttttcgctggaaacggaaacgaaatgctatgaaaacattcaaacgtcgctgatcggcattcaccaaaggcagaatgcggcattggcgatattggccgctgaatggctgaatcgtctggaagccgcagccatttctgaagaagcgatgcgaaacggtctgaaaaaagcatcgtggccgggccggtttgaacgtcttcaaagccgccctttagtgtttgcggacggcgcgcataacgaagagggcgttgaaacgctgatagaaacgatccgccagcgctttgccgataaaaacgtccatgtcgtattcagcgcattaaaagacaaaccgtatcaggaaatgattaaaaagcttgaaaccgaagcggattccattcactttgtatcatttgactttccgcgtgcttcaagcgccgaagccctttataacgcaagcagtctagcggataagagtttcgatgagaacccggacagtgtgaaagagtggattgaacaaaaagatggtgcggatgatgtcatcatcattaccggctccttatattttatttcagaaatgagaaagcggcttatctgacagcccctcggatgcccgacggaccattttccggttttgccgggtgtttttatgctgaaaatatattttcagccatttcagtcatggtgtttttctttgctataatctgagccagattgatagtaaaggtgtggtctgagtgcttttgattctgttttttctcggcttgattttcggttcttttttttatacagcagcgtgccgtatcccgctgcgaatctcggttatttcgccgcgttcagcctgttcgttttgccgcttgccgctctcctggggggagcttgtgcccgtcgtttcctatattctgcaaagaggcagatgcagaaactgccgtgcaaagctgtcggttatgtatccggcggcggaatgctggacggcgtgtttattcacggctgcaggcattcatttcggtttctcaaaagaactgttagtcgcgctgttatttctgtctctgctcatgattgttactatgacggatctgcaatatatgctgattcctgacaaggttctgctgttttttcttccgcttttcatcgccggccgtatgttttctccgctggattcatggtatgcagggtttgcgggagccgtttgcggattttttctgcttgtttttatcatgtttgtcagtaaaggaggcatcggcgcaggtgatgtgaaactgtttggggtgatcggcctgacgctcggcgtgaagctcgtgctcattgcattctttctttccgttatgatcggagccgtatacggtatgtgcgccgcagcccggggcaggcttggtaaaaagcagccatttccgtttgcgccggccatctcagccgggagcgctttgagttatttatacggtgaagagctgttttcgttttacatcaagctagcttcaggaggggcttgaaaaatttggcgaacgttttttggacaagacgacaaaagtcttgttcttttttttttcgcctatgctaaagtgtgaaccatgatcagttcaaggtacggccaagacgaatgcaagggggaagagacgttgaaaaaaaggaagagcaaaaagcacagcaaagcaaaaaacaatgcccttaaagtaaccattaacggacaagaagaaacgatgtatggacaagaagatgtgaaagaaggcggggagaaaaccgtcacattttcaaattgggaggaaacaaaaaaggcggagcaggagaccgctgcatcccatgaagatccgaaagaagaagatttcaattgggatcatgagaagaattctgaggtatttgaagatgacccgaaagtcgttccgccataccagaagaaaaaaaacggccctcactttccgaaaaaaaagcagccgtcttctccagttaaaaaagcggtcacgacaattgccgttgcggctgttttaggcaccgggctcggccttgtcgccttaaatatgtcgggaagtaaagaagcctccgctccggcatcagctgacaaaggttcacaagggcagacggcgaaagcgggggatgtttctaaagacaaatctgaaacagccggcacaggagatgcggaatcttcagagggaaactataaaacatatgcggtgcaggccggaaaattttcatcagaaaaaggagcgcaaacgcttgttgaccagctgactgaaaaaggatactcggccgtctctctggctaaagaagatggatacacatacgtgatcgccgggcttgcagcggaaaaaagcctatcacagcaattgggtcagacactgatagaccatgattttgaggcttggggcggaaaagagctcagctttgcggtcgattcaggactggaagactcttttaaacaagcatctgagctctccgccaaagcgattaccggcaaagatctttcaaaaacggaagtggctgaagcggcaaaagcggcagacggtgcagacgccgctgacaaaaagcagaaagaggccgtgcttcaagcgctgaaagaactggaaacgtcgggttcagaatccggctggaaagcccaaaaagagcttttaagtgttgtaaaatagtatctcatttcccgtcatccggcgggattttttattttgtcatcaaaaagttatttttctgaaattgtggttgcccgtttgatttggtaggatagacaagtatctttttttcttaagcaaaccctgaaaggatgacaatcatgacaaaacgcttaatactcgcatcacaatctccgcgaagaaaagaactccttactcttcttcagattccttacagcattattgcaagccgcacagaagaaaaattaaatcgaaacctttcgccggaagaaaacgtccaatgtttggccgagcaaaaagctggtgctgtattggccgaaaatcccgatgcagtcgttatcggggctgacacgatggtgtgcatagacggcgagtgcctcggcaaaccgcatgacagagaagaagcggcacacatgctgcggaggctttccggccgaagccatcaagtcattacggcggtcagcattcagacgcatgaccggaaagaaacgttctgtgacacgacggaagtgacgttttggccgctcagtgaagacgacatacagctctacattgaaacaaaagaaccgatggataaagcaggtgcatacggcatccaaggaaaaggcgcgcttttagtgaaaaaaatagacggtgatttttattctgtcgtcgggcttcctgtcgctaaaacaatgagagccttgaaagaatttaatataaaagcttgatgttcaaaccgggaaggggaacaaggaggggttgatcatccgtgatctgccgttaaaattaagagatttccccgaaaaagaaaaaccgagagagcggcttctgcacttcggagccgaacatctctctaacaatgaattgctcgccatcctgctgcggacgggaacgaaacatgagtccgtcatgaacctcgctcaccggctgctgcggacgtttgacgggctgcgactgttaaaaggcgcctctgcccaggagctttccagcattccgggaatcggcacggtgaaagccgttcagattcttgccgcaattgagctggggagccgcattcataagacatccgccggggagcattgcgtcatccgctctccggaagacggggcgaagtatgtgatggaggatatgcgctttttatcccaggagcattttgtctgtttatatttaaataccaaaaatcaagtcattcataaacgcaccgtttttatcggaagtctgaattcatctattgtccacccgcgggaggtgtttaaagaagctttcaaacgatccgccgcgtccttcatttgtgttcacaatcatccttcaggagatcctacaccgagcagggaagatatagaggtaaccaggcggctttttgagtgcggaaatttaatcggcatcgagctgctggatcatttggtcattggtgacaaaaaatttgtgagtttaaaggaaaaaggatatttgtaacactttttttttcgttgatttaagatataatagattttatgagtttttccctttagggtatttttgctttaagaaaggaagatacatacatatgttcggaattggtacaagagaccttggtatagatttgggaaccgcgaatacgcttgtgtttgttaaaggaaaaggaatcgtagtgagagagccgtctgtcgttgctctgcaaacggatacgaagtccatcgttgcggtcggtaacgatgcgaaaaacatgatcggaagaactccgggcaacgtggtagcgctccgtccgatgaaagacggcgttatcgctgactatgaaacaactgcgacaatgatgaaatactacattaatcaggctgtgaaaaataaaggattgtttgcgagaaagccttacgttatggtgtgtgtgccgtcaggtattacggccgttgaagaacgggcggtcatcgacgcgacaagacaagcgggcgcacgtgacgcttatccgattgaagaaccgtttgcagcagcaatcggcgcgaatcttccggtatgggagccgacgggcagtatggtcgttgatatcggcggcggaacaactgaagtggcgatcatttctttaggcggcattgtcacgtctcagtcaatccgtgtagccggtgacgaaatggacgattcaatcatcagctatatcagaaaaacatataatctgatgatcggtgaccgtacggcggaagctattaaaatggagatcggttcagcagaaaccggtgaagaaaatgcgtcaatggaaatccgcggccgcgatcttctgacaggtctgccgaaaacgatcgaaatcacgggaacggaaattgcaaatgcactgcgtgatacagttctctcaatcgttgacgcggtgaagagcacgcttgaaaaaacaccgcctgagctggccgctgatattatggacagaggtattgtattaacagggggaggcgccctgctccgcaatctcgacaaagtcatcagcgacgaaacgaaaatgcctgttcttatcgctgaagatccgctggattgtgttgcgatcggcactggaaaagcactggagcacatccatcttttcaaaggaaaaacaagataatcaggagttaaatagaagaggtgtatcacgatgccgaacaaacggttaatgctattacttctgtgtattatcatattggtggctatgattggattctcgctgaagaacggccgtaataccacctggcctgaaaagctgatcggtgatacgacgggagtatttcaaaacatttttcacacgcctgccgaatattttgcagggttcttcggggacataaaagacctgaaaaacacgtacaaggaaaacgaacgcttaagacaaaagctggacggacagacacaatatgaagcgaagctccaagaactcaaagatgaaaacaagaagctgcgtgatgaactcgggcatgtcaaatcaatttccgactatgatccgattttagcgaccgttatcgccagaaaccctgatcaatggtacaagcagatcatgatcaataagggaacgaagcagaaagtggccaaagacatggctgtcacgaacgaaaagggtgcgctggtaggaaagatcaaaagcagcggactcaacagtttcacatccgccgttcagctgctgagcgatgttgaccgcaataacagagtggccaccaaaatctccggcaaaaagggcagcaaaggctacggtttaattgaagggtatgataaaaagaaacagactctgaaaatgaccatccttgagccggatgaaaaacgtgaagtgaaaaaaggcgacctcgtggagacatccggaacgggcggcgtatttcctcaaggactgacggtcggggaagtgaccgatgtagaatcagatgcttacggcctgacgaaaatcgcttacgtgaaaccggctgccgacctgtacgatcttgaccatgtcatcgtcgtgaaccgaagcgtagcaacaggggaggaaggatcgtgaaacgtttccttctccctttgattatgattttggtcttttgtgcggaaagcatctataccgatctggtgcgttttcctttcgtttccgtcgagcagcaggtcgttccgcattttcttttgcttgcgctgatttttatgtccgcttatatcaaccaaaagcatgcggtgatctacggtttgattttcggatttctttatgacatcaattatacgggtgttttaggcgtttatatgtttggttttgccggtttatgctatctggcggccaaagcgtttaaagtgctgcagacaaacgccctgatggtcattctggttgcggtgctgagcgtatgtgtgcttgaattttacgtctacggcattcagacgttaatccgcagcggcacaatgacatttaacgattttgtcattcagaggttcttgccgaccgctttgctgaatattgcgggagccgttatattagtcctgcccttcaggctgttttatataagtctgaagaaagaattaagagatgagtaaaaaggattttatctttttttgacgaaaagagtatgttgttgaggtgaacattgatgaagaccaaaaagcagcaatatgtaacaataaaaggaacaaaaaacggcttaacattgcatctggatgatgcgtgttcttttgatgagcttctcgatggtcttcaaaacatgctgtcgattgaacaatatactgatggcaaaggccaaaaaatcagtgttcatattaaactcgggcatcggtatctgtatcaggaacaggcagagcagctgactgatctgatcgcgtcaaagaaagatttagtcgtgcattcaattgacagtgaagtcatcgccaaagaagaagcgcagcggatgaaagaggagcaggaaattgtttctgtttccaaaatcgtccgttcgggccaggtgcttcacgtgacgggagatttgcttttaatcggagatgtgaatcccggcggtacgatcagagccggaggaaatatatttgttctcggttcattaaaagggattgcccacgcgggttataacggaaataaccgggctgtgatcgccgcatcagaaatgatgccgacacaattgaggatcaatcacgtgttaaatcgctccccagaccacattcaaaaagggaacgacatggaatgtgcttatttagatactgacggaaatatggtcattgaacgccttcagcaattggctcatttaagacctgatctaacaaggcttgagggaggaatgtgaaattgggtgaggctatcgtaataacttcgggaaaaggcggagtaggtaaaacaacaacatctgcaaacctcggtaccgccttagccattttagggaagcgcgtctgtttggtagacacagatatcggactgcgcaaccttgatgtcgtaatgggtcttgaaaacagaattatttacgacttagtagatgtaattgaaggcagatgcaagacgcatcaggcgcttgtcaaagacaaacgttttgatgatctgctgcatttaatgccggctgcccagacaagcgacaagacggctgttgtccctgagcagatcaaatcgcttgtgcaggagcttaagcaggaatttgattatgtgattattgattgtccggccggaattgaacaaggctataaaaatgccgtctccggagctgataaggcgattgttgtgacgacgccggaaatatcagcggtgagggacgctgaccgcattatcggacttttggagcaggaagatatcgaaccgccgcgccttattgtgaaccgcatcagaaatcacctgatgaaaaacggtgacacgatggatgtggatgaagttgttcatcatctgtctattgatctcctcggaatcgttgctgacgatgatgaagtgatcagggcttcaaatatcggcgaaccgattgccatgaattccaaaaaccgcgccagcattgcgtaccgcaatatcgcccggcgcattttaggagaatccgttcctttgcaggtgcttgaagagcagcaaaaagggatgatggcgaaaatcaagtcatttttcggcgtgcgttcataatatataccagaatacaaagatctgatgaagcccagcttatcaggtcttttttgtttttcaagagcgcatatttgcaatggacaagacataggatgtacaaacccaacgattgcaaaggatgatggcgatgagtcacagagctgatgaaattagaaaaagactggccaaaagaagaaaacagcggcctgaatcaaaacggactttcgttcaaaacgcccaaacgcagaattttcccgcgtggcagacggtcaaggagcaggaaaagcacaagcttctaccggactacgaatatcaaacggaacacccgcccgaatttaacggacggcatccattgatcagcgctcattctattattttaaaatgcctgctggccgcctgtctcgtactgatctccgctattgcctataaaactgacaaacagccgctgagtcagatcaaaccggcgatcgcacaaacctttcaaaaagaatttcagtttgctgccgtaagcaattggttcgtatcttccttcggaaacccgctcgcttttcttacgccgggaacgaaaaagaaggacggtcaggtggcggtcagtcaggatatggccgttcctgccgcggggaaaatccagcaggactttcaaaataacggagaaggcgtcgtcgtcgaaaccgccagcgaagccattgacagcgtaaaagaaggctacattatggaagtgagcaaagataaaaaaacagggctgacggtgaaggtgcagcacgccgacaataccagcagcatttacggccggctaaaagatgttaacgtttcattgtacgactttgtcgataaagggaaaaagatcggttcgatcaagctcaacgataaaagtaaaggccagtactatttcgcgatccaggatggcgataaattcatagatccgatccaggtgatcacatttgatgaataaatggctcatcctcctttttaaaattcatgtccatccttttctttggattatcatggggcttggtcttatgacggggcacatcaaagcgctgctgtgtcttttgctggtcgtatccgttcatgagctggggcatgctgctctggctgtgtttttttcgtggcgcattaaacgaatctttctgctccctttcggcgggacggttgaggtggaggagcacggaaaccggccgcttaaagaggaatttgcggtcatcctggcgggcccgcttcagcatgtgtggcttcaggcggcagcctggctctttttcatgtcaggctttgcaagtgagcagacatttgagatgtttaccttttataatctctccattcttttcatcaatcttttgccgatctggccgcttgacggcggaaagttcgtgtttttatacttctctaaacaaatggcttttcaaaaagcgcatctcctcagcctgcagacatcggccgtttccgcgcttttgctctgctgctggattgtgctggccgtcccccttcaggtcagcgcatgggttctgttcgtctttctcgccgtctctttatgggatgaataccggaagcggcattatattcagctgaggtttcttttggagagatactacggcaaaaaccgcgatgtcgccatgctgcatcctttgacggtcgcggccgatgccaaagtaaagcatgtcatggccgaattcaaacggggatgcaagcaccccattatcgttgaaaaagccggcgaaaagctcagccagctcgatgaaaatgaagtgcttcatgcgtattttgccgataaacggacagattcctctatggaagacctgctgctgccttactagaaatagattgacatatccttttggttctgatatattttttaatgttatggatgtagcaccaatgctacaaccgctcgggacaggtgataagagctttaaagccccctgttgctggcgagtcttagtctaataggaggtgcagagaatgtacgcaatcattaaaacaggcggaaaacaaatcaaagttgaagaaggtcaaactgtttacatcgaaaaacttgctgctgaagcaggtgaaacagtgacgtttgaagacgtattgtttgttggcggagacagcgtgaaagtcggcaacccaacagttgcaggcgcgacagttacagctaaagttgaaaaacaaggccgtgcgaaaaaaatcactgttttccgttacaagccaaagaaaaatgttcataaaaaacaaggtcatcgtcagccttatactaaattgacaatcgaaaaaatcaacgcgtaagcatgattgaggcaacaattcgaagatcccggaatgacgggggcatattgtcctttgaaatgacgggacatgccgattttgctgaacatggacgagatctcgtatgcgccggggtcacggctgtcgttttcggagcggtcaatgcggttatcgcgctggctcctctcgaaccgattcttgatataggcgaggacgggggttatttctactttgaattccctgaagccgctgatcaggaagctttgcaaaaagcgcagctgctgattgaaggcatgattgtttctcttgaaacgatcgagcgggattacagtgaacacttacggttgactgcaaaccaaatataggaggtgagttacatgcttagattagatcttcagtttttcgcttctaaaaaaggtgtaggttctacaaagaacggacgtgactctgaatctaaacgtttaggcgctaaacgtgcagacggtcaattcgtaacaggcggatctatcctttaccgtcaacgcggaacgaaaatctacccaggtgaaaacgtgggccgcggaggagatgacactctttttgctaaaatcgacggaactgttaaattcgaacgtttcggccgtgaccgcaaaaaagtgagcgtatatcctgtagctcaataatgacacaaaaaactccggtcgttgactggagttttttttgcagtaagcggagtaacatcaagaatgaaaagcagaggatgcgtgagtgaaccccgccttgaatgaggacatcagcttcccatacccactggatatgttccccaagcagtgataccaaaaatgtttctgcctggcatccgcattgtatgcgatccgaaaaaggaacatgatgaaccaggaaaaacaagtgtttttttaacaaagccttctctgttataattcatagtacacacttatcaagactcctaaaaagaaattaaacgattgggagtgcgaaaatgaaggatgtatcgaagaaacaagaagaacctgtaagcgatgcggctctgatcaatgagctgatccaattaatgggccatttccgtcatgattggatgaataagctgcagctgataaaaggaaacttaagtttgcagaagtatgacagggtcgttgaaattattgacgaaatggtcatagatgcaaagcacgaatcaaagctctcaaacctgaaaaccccgcacttggcgtttgactttcttacatttaattggaagtcccgttatatgaggctcgaatacgaagtgctcggagaaattaaagatttatcggcatatgatcaaaagctgtcgaacctgatgagaaaactgtttcatctgttcggtctggcggtaaacaatgaaagtgaaaatcatctgaccgtatcgctgcagacggatcaccctgacagacagcttattgtatatctcgattttcatggaacgattgcaaatgcagatgtgtttgatgaatttcgcaaatcccggcatgaggactttgatgtcatgcaatttgagctgaccggccatgaatgtgtggccgaaattggaatgaactagcggttttttacggtttagaacggaggatattatgtttgtagatcaggtgaaagtatatgtaaaaggcggcgacggcggtaacggaatggttgcgttccgccgtgaaaaatatgtgccgaaaggcgggcctgccggcggtgacggaggtaatggaggcgacgtcgtttttgaggttgatgaaggactgcgtacgctcatggacttccggtaccagcggcatttcaaagcgatacgcggcgagcacggcatgtctaaaaaccagcacggcagaaatgcggacgatatggttgttaaagttccgcccggcacagtcgtaacggatgacgatacaaaacaggtcattgccgatctgactgagcatgggcagcgtgccgtcatcgcaaaaggcggacgcggcggacgcggaaatacccgctttgcgacaccggccaacccggcaccgcagctgtcagagcacggagagcccggaaaagagcgctatatcgtgcttgaactgaaagtgcttgcagacgtaggtctcgtcggcttcccgagcgtcggaaaatctacgcttctgtctgtcgtttcatcggcaaagccgaaaatcgccgattatcattttacaacgcttgttccgaatctgggcatggtggaaacggatgacggaagaagcttcgtcatggcggatctgcccggtttgattgaaggagcgcatgaaggagtcggcttaggccaccaatttctccgccatatcgaacggacgcgcgtcatcgttcacgtcattgacatgtcagcgatggaaggccgtgatccgtatgaggattatgtcaccattaatcaggagctcagtgaatataatctgcggctgacggagcgtccgcaaattatcgttgcgaataaaatggacatgcccgaagcggctgaaaatcttaaagcgtttaaagaaaagcttcaggatgatcaccctgtctttccgatcagcgcggtgacgagagaagggctccgcgatcttctgtttgaagtcgccaaccagctggaaacaacgcctgaattcccgctgtatgatgaagaagaactggcggaaaaccgcgtaatgtacacgatggaagatgaagaaattccatttaacattacgcgtgatccggacggcgcgtttgtgctttcaggtgacagcctggaacgcctctttaaaatgactgatttctcccgtgacgaatccgtcaagcgttttgcaagacagatgcgcggtatgggcgttgatgaagcgctcagagaacgcggtgctaaagacggcgatatcatccggcttctggaatttgaatttgaatttattgattaaaaaaacggagagcttgcaatgcaggctctctgatgtaaaagggaggggtgcaggtgaaagaagagacattttatttagtgcgtgaagacgttctgcctgatgcgatgcggaaaacccttgaagtcaaaaagctgctcgacagaaaaaaggctgaatcggttgcagatgctgtgcagaaagttgatttaagcagaagcgctttttacaaataccgagatgcggttttccctttttacacgatggttaaggaacaaataatcacacttttctttcatttggaggatcggtcaggcgcgttatcccagcttttgcaggcggtggctgactcaggaagcaacgtgctttccattcaccagacgattccgcttcagggcagggcgaatgtcacgctctcaatcagtacgtccgcaatggaagaaaacattcatacgttaatgaataaactgagaaaatttgattttatagaaaaagttgagatcttagggtcaggcgcgtaaggagagaagagacatgaaagtcggttatttagggccagaagccacatttacacatctagcagtcagttcctgctttcaaaacagtgtgacacaagcaccttatcaaacaataccggcatgcatggatgcggcggttgcgggagaagttgatcttgcatttgttcctttggaaaacgcgctggagggctcggttaacttaacgattgactatttgattcatgagcagcctcttgcgatcgtgggggaaatgacgctgccgattcaccagcatctgctcgttcacccttcgagagaaaatgagtggaaaaagcttgagaaaatttattctcattcccatgcgattgcgcaatgccacaaatttcttcaccggcatttttcgtccgttccttatgagtatgcgaagtcaacaggtgcggctgccaagtatgtcagtgagcattcggaccttccgatcggcgtgattgcaaatgaaatggccgccgctacatacggattgagcatcgtgaagcgggatattcaggattatcaggacaaccacacgagatttgtcattctttcgcctgaaaaagacgtctcattcgaagtgaatgcgaaactgtcttcacggccgaaaacgacgatgatggtaacgcttccccaagatgaccaatcaggtgcgctgcacagggtgctgtccgctttttcatggagaaacctgaatttatcaaagatcgaatcgcgcccgacaaaaacgggtctcggcaactatttctttattattgatattgaacaggcgatggatcaggttctcattcccggtgccgttcaagagatggaagccctcggctgccgggtcaagcttctgggaacatatcaatcctattcgatataaaaaaagcccttcagggggctttttttttaatcttttattaaaatacccgcgtcgtccagcgcttggcaggcttggtcaatccgctcttttgtcggggcgcttaacgtatggaggtgcacgcctccggtcagctgtgaaaggtaagcggcatttgtcgagttaatgtgatccatgaattgtttgacttctttccgtgtactgactcttatggcggcggttaaatcgccgtatacggggtgttcaattatgacgtcctttatggtgacgccttcatcgacaatgagtgcaagctcttcttccgtccgctccgggccgtgcagacaggcgacaatccgttcggcatttttttcgccgccggcattcatgctgatgtataagtagccttggctcgtcgcgataatcggctcgttttttgctttcaaaagcgatatgtcctgcacgatcacctgtcttgagacatttgcttttttggccaattcgcctcctgttaatggcgagccggcttctttcagccaatgaagcagcatgtcgcgtcttttctccccagtaagcttcgttccttctgtcaaattgctgattctcctttcttttgctcccatagcgccgtaaatgtatgtatcagcatatcgagctgttcacatgttgtttcgtttccgaatgagatccggaaaaactgccgcgcttcccgttcggtttttcccagcgccttcatagctgaagaagggccgtggctgccggcggaacatgcgctcccggttgagatgcaaatatcgttacgattacattctaacataatatattgtccttcaaaggagtgaaaaaaacacccgacaatgtggggcaggcattcaccgccggtttcttcctctgaaaatgaaatggggaggccttgacgccgaatttggtcatacaaataattcctcagcctgtcagcatgctcacggtgttcctccatatgtttcactgcatactcggcagcagcggtaaaagcgccgatggccggcacattcaccgtaccgggcctgaacccgttttcatgcacggtatgcggataaaccgggttccagctgacaccgggccgaatgtaaacagccccggtgcctttcgggccgtatactttatgaccggagacggaaagggcgtcgattccctcctgatccgcatcaatcggcagtttgccgaaactttgaacacaatcgcaatgcagcaaaatgtttctctggtgaagaaaagcggccagacgattcacaggctggatgaggccggtttctgaattggcgtgctgtatggaaacaagccccgtgtcaggacggatatgagccgccagtatgtcctcggttataaggccgttttcgtcgggatatatgatggtgacattaattccacggtcagctaaaaacgccgcggcattatggatcgaatggtgttccattgcggtcgtaataaaatgttttttgtgatcgggcaggccgtgcagcaatgattggacggccaggatgttcgcttccgttccgccgcttgtaaagtaaatgccgtctgccgctccgccgatcaatttgcctgcagaatgtctgcaatattccagcacgtccgccgctcttcctccggcgtcatgaaggctgcttgcattgccgtatacctctgtgctgagatgctgaaagactttcgcggcttctttgcttaaaggcgctcccgccgcgtaatcaagataaatcatacagcccgtctcctatccgtttatgttaaaaaaaagcttgagtttattttatcgttgtgtaaatataggtgtcaagacaggtgtaaacataacaggagggtgatgtatgtctgaaaaaacaattatcgtcattggttcggggacggcggcccttgcctgtgcttcctcatttcctccgtcataccaagtgaccgtcatcacaaagagaaacgtaacgaacagcaattcgcattatgctcaaggcgggattgctgtttcatatgcaaaagatgactctatagaatcccatgtgaacgatacactgtatgcgggatgcggacacaatgacgtgacagccgtgcggcatttgctgaaaagcggacaaagcatgataaacaggctgatagaaggccacttcccttttgatacgaagtcggacgggacgttttgtctcggcagggaaggcgctcattccaaaaggaggattctgcacgccgggggagatgcgaccggacggatgttagttgagtttctggttcagcagctgagggacggcatacggatcattgaacacgagacggttgttgatctgctgattgaacacggacgatgcgcaggcgttgccgtcaaggatgcttcaggcgccgtttcttacagaagagcggatagtgtagtgcttgcatcaggcggctgcggcagtctgtaccaatatcacacaaatgattccgccataacgggagacggcatcgctcttgccttccgcgcgggagctgagatcacggatatggagttcacccagttccacccgaccctccttgtgaaaaacgggactgtgtacggcctgatttctgaagcagtgagaggagaaggcggatatttagcggatcgcttcgggcgcaggatcatggctggcagacacgcgcttgaagatttggcgccccgggatgtggtttcacgggcgatttatgaagaaatgatgaaagaaaatcctgtttttataaattgcagccgaatagccgattttaagaaacgttttccgaccataacagaaatttgtcaaacagccggtgttgatcttgaaagcgggattcctgtagcacccggaatgcattttttaatgggcggagtaaaagccgatacatgggggaaaacgtccgtgcctgatttgtacgccataggcgagaccgcctgcacaggattgcacggggcgaaccgccttgcgagcaactcactgctggaagcgctggcaagcgggaaacgatgtgctgaacatatcattcaaacgccgttaaacggaagatataaaaaaaccccgaagaaatctgacgtcatcttagaagtgccggacacagcgcttcatgtgctccaagccaaaatgacaaccggagcgggcattgtcagggaaaaagaaaacatgcaggcgctggcatcctggcttaacaacgtatctgtgcgtcatataaatgtgaagggaatcacaatagaacaagccgagctatcctgcctatggaagactgcgcaacttgttgtgacctcagcccttattcgggaagaaagcaggggggctcattttcgcgctgattttcccgggacggagaaagagtggcacggaaaacaaatcattcattcaacatctggaacagctatcagaaaaaacgaaaggattggggaactatggacattctgcagctgaaacaaatgctgactcatttttttcaggaagatatcggaacgggtgatgcgacgtcacaagcgattttttctgatcagcaatgtaaagcgcgaatcatcgcaaaaacagacggcgtgtttgccggagaagccgttatccgtgaaggatggaagcttttacacgatgatatccgcatccgctccctgaaaaaagacggagaacggatgaaaaaaggagacgtgctcgctgaaatggaaggccaggcggcggctcttcttacgggggagcgggtcattctgaatctcatacaaagaatgtcaggcattgcgacaatgacggatgaggccaaaaggcgtcttgatgatccgactatcaagctttgtgatacgagaaaaacgacacccgggctcagaatgctggaaaaatacgccgttcgggtcggaggcggctttaatcatcgcttcggcttatatgacggcatcatgattaaagataatcatattgccgcctgcggatcgataaaggcggccatggagcgggcaagaaaaacggcggggcagatgcttgcggtggaagtcgaaatcgaatccgaacagcagctgctcgaggcaatagaagcgggtgcagacgttattatgtttgacaactgtccgcctgagtccgtccggcgttttgcaggtatgacaccgggccatatcaaaacggaagcatccggaggcataacgctcgacacattgcccgcttataaaggaacgggggtccaatatatttcactcggatttctgactcattcagtaaaaagcgccgacatcagcatggatgttgaggcagcggaacagggggatttttaagatgtctatttttgacgtgctaactgcatcagccgaaatgatgccgagccattataaagacatgagcactggagaaatggaaaagcgggtcgccgccattaaacgggctttcggaaagcgcctgttcattccggggcatcactatcaaaaagacgaagtaatacaattcgccgatacggcaggtgactccctgcagcttgctcaagtggcagaaaaaaataaagaggcggaatatattgtgttttgcggcgtgcattttatggcggaaaccgctgatatgctgactgatgataaccaaaccgtcattttgcccgacatgcgcgccggatgctcgatggctgatatggcagatattcagcagacggacaaagcatggcaagagcttcaagaactgtacggtaacaccatcattccgttaacatatgttaactcgacggcggaaattaaagcattcgtcggacggcacggaggagcgaccgtcacctcttcgaatgcccggagtgtgctgaaatgggcttttaaacaaaaagagagaattttatttttgccggatcagcatttaggcagaaatacggcctatgacctcggcattccgctgacagaaatggctgtatgggacccggtgcagaaccgattgcttactgaccatccggaaaacattaaggttatcctttggaaagggcattgctccgtacacgaaaagtttacagcggaaaatatttctcagctgcggcagcgggattccggcatccgcattatcgttcatccggaatgttcgcgggaagtggtctcgctcagtgacgacagcgggtctaccaaatacattattgatacgatcgaacaggctgaaccgggaagcaagtgggcgatcggcacggaaatgaatcttgtccagcgcctcattcactcgcatccggataaacagattgaatcattgaatcccgatatgtgtccgtgtctgacaatgaacagaatcgacctgccgcatttattgtggtcgcttgagcagcttgaaaaaggcgagccgaagggtgtcattaaagttccggaagcggttcggacagaagcgcttcgtgctttgaacagaatgctgagtcatacgtaatcataaaaatttcccctccttcccaaattttttatcatcatgcccagtccatcggcatatagtgtgaagaaacgtattgtaatgacaaatgtaccgttcacgttttgtgcataggaggggaaaacgttgaaaattcatatcgttcaaaaaggcgattcgctctggaaaatagctgaaaaatacggagttgatcttgaagagttaaaaaaactgaatcatcagcttagcaatccagacttaattatgcctggaatgaagataaaggtgccttcagaagccgttccggtcagaaaagaacctaaggccggcttcggaacgtctgcgcataagcatgagcatccatatgccaaagaaaaaccgaaatcagttgtggacattgaagacaccataccggaagaaccaaagccgtcaattccgtatgtgccgccaatccctgaaaagcatgaaaatgtgctgccggaagctgatatgaaccaatattacccgtccaatcagctgtttcagccgtggtcgcctcctaagccggaggaaccggtgacacattttgtcgagccgaaagaaaaagagcatgacaataacattccacaacaggaggaaatgatcaacatggaaaacgcgaattacccgaatatgccaaaggcgcctgaagccggaaagatggaagaagaaaacgccgcttatcatctgccgaacatgccaaacattccgaatgtcccgtttccgaatatgccggccgttgaaccgtcttttatgcattatccgatgccgtgcatgccttgtccttgtccggttccggtgacaccgatgctgccgggttcgggactatgccatccgtgcttcccggtaggcggaggtttcggcggttttggaggaggttttggaggctttccggtcatgccgatgccgttaccgtacggattccatcatccgggatttgggccgcatgcgggttacggtgaatatgaaaaccaggcccatgaaaatgcagagcattatgatggttctgcatctggtttcggcggtgctccgtacggtcaaatgccgtattacggcggatattcgtcacattacgcaaacgcgcctcatcatgatggaaaatataaggatgatgattgcggctgccatgattcacatcatcaccaccaccatcaccacggttcacatcaccatcacgcaaatatgcctgtgcagccgtatccgaatatgggtgcaaacgccggatattttatgccttacggcggagcaaatcctaatgccgcgccgaatcagccgagtccaaatcaagtattcggacggccggaggaagaagaagattaatgtttcgggacgatgtatgtcgttcctttttttatgtccaactgaggaatggacataactgacaagcttaaacccgccgcccgccgcgcatcctaaacatgagcggaaaacgctcaaaacagcgatgaatccacggggggtttttccattgggtaaaaaactgatgacgatcgcgggcgttttagccgtgacggcaagcttaacggcatgcggagcaaataatgccatgaatgacggacgctacaaccagtcaacacgtccggtcggatattattcgaatgataatggtaacggcagaggccagtacggaatggaccatcaaggacccgtttctgaaatgatggaaaaccgaaacggccgtcataatacgacaaacgtgtccgaccagtacgcgcctaatgacggggctccgttaacgacggacggcacatataacggccgaaatgtcaatacgccgccggcagcaatgtcttataatgggtatgacaacgccgaaaacatcaggttggcggcaaaagttgcaaaccgcgtgaaaaaagtaaaaggcgtacaggatagtcaggtcatcgtgactgacacgagagtcgtcattgccgtcagaacaaatcatccttttacgaagaatgatgataaacatgtcaaacatgcggccaaaaaattcgcggacggccgtacaattcaagtgtttaccgacaacgctacttttacaaagctgcaagacatgaacagaaacagccgttaaacgggactgccggatgatttcatccggcagtatttttatgaataaagcttcatcatttctttacatattcttaaaacgctctttatattgcggtgttaacataaaagtaataaaacgtaacggaggggccggaatgaaaaaaacggagcatgacaaaagccgcggagcaaaaactgtgtatctgaccgtaaggggataccggctcaaactgacgcccggacaaatgaaactgatttcagccggccgggcataatcatcgcagcagccctcatttagagagctgctttttttcggctgaaacagacaaatgaaagaaaacgattaagcaccggcatctttggtcaaactagcatcaagagtttgattgaataaagaggtgttattggtgaaacgaatttgcggtgctcgtctattgtttatgcttgtcttatcggctgcagtcctgatttgcggaggaaaaggcgcatatggggcggaggttgagctttacgggccgcttcgggtgcacgtccagctggaaaaggtctatcttgacggtgatgtcggcatcgaacatacggatgaaaccgttttagcgatggaggatttttgggcctcatatgccggctggacgctcgttgagcagaaaaaaggcttcgtccttttccgtaagcatgttgatgacatttctccgctcagtaaggttaacggttatatcggcgtcacggacggaggcgtcatctccacttttcacggccgtcccggatcgctggccgagccgattcaatctttcttccagattgatatagaaagactggaaagccgattgcaaaagcacttggaacacggcataccgtacaggacaaaagcggagtttgagagcgtgatcgatcatattaagacttacagcggctgactttgacgcaagacatgtgacacatgtcttttttttctgaatggaaggtgtcaaagcgaacatacgttaacttttctataagactttggctgtttttgtgttacaatgataagcagtcaaagaggtgaataggtgtgattgaattcgtgaaggggacgattgattatgtatctccccaatacatcgtgattgaaaacggcggaatcggctatcaggtcttcactccgaatccgtttatttataaggtaagcaatcaagagaccatttttacgtatcatcatataaaagaagatgccttttctttgtacggtttttcaacccgggaagaaaaagcgcttttcacaaagctgctgaacgtcaccggcatcgggccgaaaggggcgctcgccatcctcggttccggtgatcccggagccgtcatcgaagcgatcgaacaggaagatgaagcctttttggtgaaatttccgggtgtgggcaaaaaaacggcgcggcagattattcttgatttgaaaggcaaactggccgacgtcgtgcctgaaatgattgacaacctgttcaatcatgaagcgcgcattgaaaaacaagaggctgaaacggcgcttgacgaggcgcttgaagcgctccgggttctcggctacgccgaaaaagaaattaaaaaagtgcttcctcacttaaaagaggaaacggcgctttcaacagatcaatatgtgaaaaaagcattgcaaaaattattaaagtaaggtgatgttcatggatgaacggctcgtttcaagtgaagcagacagccatgaatcaataatcgagcaaagcctcaggccgcagaatctcgcccagtatatcggccaaaagaaggtgaaagaaaatctgcgcgtgtttatcgatgcggcgaaaatgaggcaggaaacgctggaccacgttcttttatacgggcctccgggtctcgggaaaacaacgcttgcgtctatcgtggccaatgagatgggtgtggagatgcggacgacgtcaggtcccgccatcgaaagaccgggggatttggcagccattttgacggcgctcgaaccaggggatgtgctgtttatagacgaaattcacaggctgaaccgctcaattgaggaagtgctgtacccggcgatggaggatttctgccttgatatcgtcattggaaaaggcccgtccgcccgctccgtccgtctcgaccttcccccttttacgcttgtaggagcgacgacaagggtcggattattgaccgcaccgctcagagaccggttcggggtgctgtcgcgccttgaatactatacgcaggaagagctgacagatatcgtgtcaagaacggctgacgtttttgaagtggatatcgaaaaagcaccggctctggaaatcgccagacggtcaaggggaacgccgcgggttgcaaaccgtctgctcagaagggtgagagattttgcccaggtgctcggcgacagccgcatcacggaagaaatcgctcacgacgcgctcgaacgtcttcaagtcgatgcgctcggccttgaccatatcgaccataagctgctgatgggcatgatcgaaaaattcagcggcggtcccgtcggtcttgatacgatttccgcgacaatcggcgaagaaccgcatacaatagaggatgtgtacgaaccgtatctgctgcagatcggatttcttcagaggacgccgaggggacgggtcgtgactccggctgtgtatgaacattttcgattggaggcgcccgcccgtgactgactttccgaaggttctcatggttctcggtgccgttttgcttattgccggcgcagtctggcactttgtcggaaggctgcccggagatatttttgttaagaagggaaatgttacatttttctttcccgttgtcacttgtattgtgatcagtgtgatactatccattctgcttaattttttcggcagaataaaataacaatagacagaattaaggtgaaatgatgaaagtcgatttatttgattttgaactgcctgaacgcctcattgcccaagtgccgcttaaagagcgtgacgcatcgcggctgatggtgctcgacaaacagacgggcgggctgacggacagttcatttaaagagattgtaagcttttttaatgaaggggattgcctcgtcttgaacaatacccgtgtgctgcctgcaagattattcggcacaaaagaagatacgggagcgaaagtggagcttctgttattaaaacaggaagaaaatgatacatgggaaacgctcgtaaagccggcgaaacgcgtaaaaaaaggaacggtcctgacatttggcgacggccggctgacagcggtctgcacggaggagcttgatcacggaggcagaaaaatagaattccggtatgacgggattttttacgaagtgcttgaatcactcggtgaaatgccgctgcctccttatattaaagagcagcttgatgataaagaacggtatcagaccgtcttttcaaaagaaatcggatctgccgcagctccgacggccggacttcattttacggaagagattctggacgagctgaagcaaaaaggtgtgcggattgaatttatcacacttcatgtgggactcggcacattccgcccggtcagtgcggatgatgtggaagagcataacatgcacgcggaattttatgaaatgacggaagaaaccgccgcctctttaaacgaggtcagaaaggcgggagggcgtatcgtgtcggtcgggacgacatcaacgcgcaccctggaaaccattgccggcgagcatgccggcgaatttaccgcttcaagcggctggacgtccatcttcatttatccgggatatgaatttaaggcgattgacggcatgatcaccaattttcatctgccgaaatcttcccttattatgctcgtttctgcgcttgccggcagagagcatgttctttccgcctaccgtcatgcggtagaagaggaatatcgtttcttcagctttggcgacgccatgctgattatctaatttgaatgacaggaggcctcatacaaagtggctgaacaaccgatacgttatgaatttataaaggaatgcaaacaaacgggagcgcgcctgggcagagtccatacgccccacggctcctttgagacgcctgtatttatgccggtcggcacgcttgctacggtaaagacgatgtctccggacgagctgaaatctatggatgcgggcattattttaagcaatacgtaccatttatggctccgcccgggacatgacattgtaaaagaagcgggcgggcttcataagtttatgaactgggaccgcgcgattttaacggattccggcggttttcaggtcttttcattgagcaagtttcgtaatatagaagaagaaggtgttcatttccgcaatcacttaaacggagacaagctgtttttatctccggaaaaagcgatggaaattcaaaacgccctcggctctgatatcatgatggcgtttgatgagtgtccgccgtatccggcagagtatgattacatgaaacgctctgtggaacggaccagccgctgggcggaacgctgcctggaggcgcacgggcgctcagatgagcaggggctgttcggaatcgtacagggcggagaatacgaagacctgcggacacaaagtgcaaaagacttggtttcgcttgattttccggggtatgccataggcgggttatctgtcggcgagccgaagcacgtcatgaaccgagtgcttgagtttacaactccgcttttaccgaaggacaagccgagatatttaatgggtgtgggttcaccggatgccttaattgacggcgccatccgcggcgtggatatgtttgactgcgtactgcccacccggattgcccgaaacggcacggtgtttacgaatgaagggcgtctgaatatgaaaaacgccaaatatgagcgtgatttccgtccgattgatgaagagtgcagctgccatacatgcaaaaattactcccgcgcttacatcagacatttgatccgctgtaatgaaacgtttggaattcgattaacaacttaccataaccttcattttctgttacacttaatggagcaggtcagacaagccatccgggaggatcgtcttggtgatttccgagaagagttctttgagcgttacggctataataagccaaatgcgaaaagcttctaaataaaaccattcttgaagggagggaaacagatgggtactttaggtacaatcgttcctattattttaatgtttgcagtgctttatttcctgctcatccgtccgcagcaaaagcagcagaaggccgtacgccagatgcaggaagagctgaaaaaaggggattcagtggtgacaatcggaggattgcacggcactgttgagtcaattgatgaaagcaaggtcgtcattaaaacaggtgataacacccgtttaacatttgaccgccgcgcaatcagagaagcttccgctgaataacagcgaagctcatacatacaaaaaaagagcggagaatccgctctttttttattacgctgatctgcttcctttcaaattcactccgaaaatgccgcccagcatactgactcccaaaaagccgagatgaaacaaaagctgaccggatgtaaacgtttttccgaaccctaaatattgaaacagcaagataattaatgaaaaacagacggcggttaacgctccgatcatccagcctttttccttcgctttgccgcccgatataaaaccgcccgcaaataaagaaagaaaagaaagcgcggtgatcagccagctgaaagatgattcttccattgaggtaaccgtcagtaaaagcgaaatcgccaaactcgtaagaagcatcaccgcaaagatagccactaagccgtacaagacgcctcttcccacttgtttcgtttcttccatttttatctcctctccgctctgcggcctgatatatgacaagccggagcccgtctttttctaaatgtattctctgaatgttcgaattagacgtaaatgcatgatgttcagcccgtttcttacataattcagagccgatggcaaatgctatgaccgttggaggtgcgatatggaagatattttcattattacgtttcgtacgattgtgctttattttatcattcttgtgattttcagactgatgggaaaacgggaaatcggagaactgagcattttagaccttgtcgtctccattatgattgccgagattgccgtattggcaattgaaaatgtaaaagataagcttttgcatacgattgtgccgattgtcgttttaatgattattcaagtaagccttgcttttatttcgctcaaaagccaaaaaatacggcagctgcttgacggaaaacccaccattattataaaacagggaaaaattgatgaacgggcgatgagatcgcagcgctacaattttgacgatcttcttatgcagctgagggagaataacatcgatagaatctctgacgtgtcatatgccattttggagtcttcaggcaaactgtcgatcgtcaaaaagaaaaacaataaggataagcagatggaaacatcgcttatcgttgacggggtcattcagaacgagcatctggacagaatcgggaaagataaacactggctcgaaaaaaatttagcaaaaagaggatatcgcgatctttcggttatatcattctgcacgtttacggacggcgctttttttattgatcttaaagatgaaaaaggggagccgtgaatcggtttcaccgcgtcacgaacttgccgatgaccggaatccggatcagctcttcccttttaatcagcctgaataacagaagaagcgctatatacaaaatcgcggtcattgcaatccagcctgtgagattaacagcctctgaccctgaaaaatgaacggtgtgcttgatgatgcggctgacataaccgcaaatgaatatgacggcaaaacagagcgcgtattcttttattttaatgctgatcggaagcaccttgcttacggtggccgcatgcatcagggtgacaaggaccatccccgttacaatcgcaagtgcggcgcccatgatgcccaaggaaggcctggtcgccaaaacaaaaattaggccagttttgacagcggcgccgataaaactgttcatcatggcggccccggctaaattgagagcctgcagcaccgcctgaaggggcccctgaaaatagtaaagcagaaaaaacggcgccatcactttaacaaataccgccgcattagttgatccgtacatgacggacatcagttcatcagcgaaagagaataaaataaccaccgaaatgcctccgcttaaaagacacagcctcatcgcctgttccagacggtattcgacaacttgcagctttttttgctccattccttcactgatcgcaggaacaagcgccgttgacagagaataggttataaagctgggcagcgtcaaaaccgtcatggcaaatccggtcagctccccgtactggctggtggcggcagcggtggccactcctgcaatcgcaaggctttgcgcgacgacaataggttcaaaaaaccaagataaatttccgatgaagcggcttccggttgtcgggagcgacacgctcatcagctggcggaaggtttcttttccatttgcgatcgacttgaaaaattgttttctgattctgattgttttatttgctttaaaacaaatgaataaataaataagagaggcaagctccccgatgacagacgaaatcatggctccggctgcggcatattcaatcccgtacggcagaaacaccgtcgtgcagaccgcgacaagtgaaatccgcacgatctgctcaagtacttgggaaaacgccagcgggttcatattctgcctgccctgaaagtaaccgcgcagcacgctggagatcgcgataatcggcacgacgggcgtaatcgccagaagcgggtaaaccgtgcgctgatccgtcagcatcgtttcggacataatcggcgcaaagcataaaaacagcggcgtgaagatgagacttaatatcccggtgacggtaagcgacatcactaaaatatgtttcattttctgccggtccccccgcgcgctcgcttcagcgacaagtttgctgatggcaacggggaggccgaattgagtcaaagtggtggccaagaaaaatgtcggggcagccatcatgtataaaccgaccccttcttcaccgataaaccgggcgataaccacccggttgacaaagccgagcattctcgtaatcatcccggctgcgatgagaataagagtgccccttaaaaaagtctgttttgccattttataaacccctgccttctcaaactacctggaatcatatacaataaagatatgcgccgatgtcgtccgagcatgacaagtcttcgagaaaaatggaaaaaggagcgagcgcccagtggagaaacatcccgccgaaatgtacaaagatcatttgcggcctttcttgtacagtaaacttgaagagttcaaaatcctcggatacgatgatgttgagcacgagagtttatggtcatacttaatacataaaaagtggaaacagaaaaaggaactgccgctgcatgaattggccggtcatattttatcagttaaaattggcgattttatgaactatgcaaccgttgaagcttttaagtcgtctaattggctggaaagcgatgagggtcaggaagctttagatgaactgctgagataatgatttgacggcataggtttaaggaggaaatacataatgaaaaaaggacgcttgattgcgtttttcctgattgtattattgatcggcacagggctggggtattttacaaaaccggctgccaataatattacgttaggattggatttacgcggcgggtttgaagttctgtacgatgtgcagcccgtcaaaaaaggcgataaaatcacaaaagacgtgctcgtcagcacggtgcaggcgctgaaccgccgggctaacgttctcggcgtaagcgagccgaacattcagattgaaggaaataaccgcatccgcgtacagctggcgggcgtcacgaatcagaacagggcgcgcgaaattctgtcaacggaagcgcagctctcgttcagggatacgaatgataaagagctgttaaacggctctgatctcgtggaaaacggcgcgaagcaaacctttgatccgacgacgaacgaaccgattgtcagcgttaagctgaaggatgcggataagttcggcgaagtgacgaaaaaagtcaagaaaatggcgcctaataatcagcttgtgatctggcttgattaccaaaaaggcgattcatttaaaaaagaagtcggcaaaaaacatccgaaatatgtatccgctccgaatgtgagccaggaattaaacacgaaggatgtcacaattgaaggccagtttaccgttcaaaaagcgaaggatttggccaatattttaaacgcgggcgcgctgcctgtgaaactgaccgaaaaatactctacttcagtaggggcgcaattcggacagcaggctttgcatgatacggtagaggccggcattatcggtattgcaattgttttcttatttatgctgctttattacagactgcctggactcatagcggtaattacgctttctgtatacgtgtatattacgcttcaagtgtttgactggatgcaggcggtgctgacgcttccgggtattgcggcgctcattttgggtgtcgggatggcggttgacgccaacatcatcacctatgaacggataaaagaagaactgaaactcggcaaatccgtccgctcagctttccgttcagggaacagacggtcattcgcgacgatctttgatgcgaacattacaacgatcatcgcagcggtcgtgctctttattttcgggacaagctctgtaaaagggtttgcgacgatgctgattctgtcaattctgacaagctttattacagctgtcttcctttcaagattcctgctctcccttctcgtggaaagcagatggcttgaccggaaaaaaggctggttcggcgtcaagaaaaaacatattatggacattcaaaaaacggatgaaaatactgaaccgcatacggcattccaaaaatgggatttcacgagcaagcgaaaatacttctttattttctcaagcgctgtaaccattgcgggaattatcatcttaatggtctttaaactcaacctgggaatcgattttgcaagcggcgcgcggattgacgtgcagagcaatcattctttgacggcgcatcaggttgaaaaagattttgattctctcggcatggagccggaaaacatcgtgctttctggtaaagagaaccatgttgccgcggcccggtttgtcggagagccatctaaagaaaaaatcgctgaaatcaaaacgtactttaaggacaaatacggatctgaaccgaacgtcagcacggtatcgccgacagtcggaaaagaactggcccgtaatgctttatatgctgtcgccattgcatcaatcggcatcattatttacgtatcaatacgtttcgagtacagaatggctatcgccgcgattgtctccctgctgtatgacgctttctttatcgtcgcgtttttcagcattacaaggctggaggtcgatgtcacctttatcgccgctattctcaccataatcggttactcgataaatgatacgatcgttacatttgaccggatacgcgagcagatgaaaaaacgtaagccgaagtcatttgccgatctggaacatatcgtgaatctgagcttgcagcaaacctttacacgttcgatcaatacggtcttgaccgttgtgattgttgtcgtcgtgctgctcattttgggctcatcgtcaattacaaacttctccgtcgctttattggtcggtttattgacgggcgtttattcctctctttacatcgccgcgcagctgtggcttgtatggaaaggtaaagaatttaaagggaaaaaatcaatcgaagagtaaaatgggaacaggctgtcttccggaaggcagcctgttttttcaggccgcattgaacttaaaacctgcatttgctataatgacatacgcttacataatcaatcatcattgtaaaaacatgtaggagggttcttatgaacgttcgtgagtcggagcttccgggcatcggccagaaagtagaagtcattacgaaaaatcacgataaaatcagtattattcttcatgatgacggcagaaaagagctctattacttcgatgagaatgatcatgacgaatgcttggcatccgttgaatttaacgacgaagaggcgaggcagatttccgctattttaggtggtatgacgtataagccgaaagcgctggaatctgtggaagtcgcgcttgatgacctcgtcattgagtggtttaaagccgaatctcatgcaccggctgtcagccgtacaatcggagatttggagatcaagaaacattacaacgtccagattattgcgatcgtaaagaaaaaccggcaaaaacagctgagccccggcattgataccgtaattgaagaaggggacaccctcgtcatatcgggagaaaggagcggactgaaaaagctggtccgcgagcagttaacggcccggatttcctgagaccggggtttactcccgggaaaatgggggaaaagataagaatgaacaattgggggcagacgcatgaataaacaatggactattatattcgctttactatttactttgattgtcgccatctttgctgtcattaacgtgcgggcggttgaggttgattatctgttcggaaccgctgaatggccgctgattttagtcattttaggctctgtgttaatgggagcgctgatcgtgttttcagccggtatctttcaagtgatgaagctgaagcgcgaaattaaaatgctgcggaaagaaaacagatctgcggctgaattgacggctgattcggacggcaaaaaaacagccgcgccgccggaagaaatgcttgaagagaaaaaaggatcagaataacatttgaaacccctcagtccgctctagtataatagggtggttgaggggtgaatttatgttagcgtcaaaaatgcgctgggaaatccagcagccggatcaggaaaaagtcaaatcactcacagaacaattggacataacacctcttgtggcatcactgcttgtaaaaagaggttttgatactgccgaaagcgcaaggctgtttttacatacaaaggatgcagacttttatgacccgtatgaattaaagggaatgcgggaagcagttgatcggataaaactggcggtttctcaaggggaaccgattatgatttacggagattacgatgcagacggcgttacaagcacgtcggtgatgctgacggcactcagacagctgtcggcggacgttgacttttatattcccgaccgtttcacagaaggctacggcccgaatgaacaagctttccgctccataaaagagcggggattttcgctgatcattacagtggatacgggaatcgccgccgtccatgaagctgaagtcgcaaaagagctgggcttagacgtcattattaccgaccaccatgagccgggacccgagcttcctgacgtatttgcgatcatccacccgaagcagccgggctgcggctatccgtttaaagaattggccggcgtcggtgtggcgtttaagcttgcccacgcgcttacgggttctttgccggaagctatgctggacttggcggcaatcggtacggttgcagatctggtgcctcttcatgatgaaaacagattaattgcgtcactcggaatcgaaaggcttcggacgacaaatcggccgggcctcaaagccctgattaagctttccggcggagatatcggacaagctgatgaggaaacgatcggatttcaggtcgcgccaaggctcaatgccgtcggaagaatagaacaggccgatcccgccgtccatctgctgatgaccgaagatcagtttgaagcggaggaactggcttcggatattgaccggctgaataaagagcggcagaaaatggtgaaaaccatgaccgaagaggctgttgaaatggttcagcagcaaggcggaaacccgtctgccattgtagtggcaaaagccggctggaacccgggagtcgtcggtattgtcgcatcgaagctggctgaacgtttttaccggcccgctgttgtgcttgggatagatgaggagcagggaatcgctaaagggtcggcgcgaagcatcagaggcttcaacctgtttacgagcctttcacagtgcagagacattcttcctcatttcggcgggcatccgatggcggcaggaatgacgttgaaggctgaagatgtggcggaattaagggacaggctgaatcaaatggctgaagaaacccttacggaagaggattttattcccgttcaggaggttgatcttgtctgcggcgttgaagacataaccgttgaaagcattacagaattgaatatgctgtcgccgttcggcatgcttaaccctaaaccgcatgtgatggtgaaaaatgcggtgcttgatgatgtgcgcctgatcggagcgaataaaaaccacgtgaaaatgacggtaaaaagtgattccgccgtccttgactgcgtcggctttaacaaaggagagcttgaagccggagttgtccccggatcaacgatttccattgtcggcgagatgtctattaatgaatggaacaacagaaagaagccccagctgatgattaaagacgctgcggtgccggaatggcagctttttgatatcaggggcaagcggacgtgggaagacacggtcaccgcgctgccgaaggaaaaacgggtgctcatcagctttaacgaaaaaaccgctcagaagctccatgcaaaagagctgtcgggcgagctggccggtatcacttcggaatccgaggcggaagctctccagcttgacggaaaatatgccgtttttctggatgtgccgccgtcagcggatcgcctgcagcatttgcttgacggaaagaagccggaacggatttattttgtttttatcaatcatgaagaacatttcctgtcctcatttccatcgcggaatgatttcaagtggttttacgcatttctcttgaaaaggggcgcttttgacttcggcaagcatggttcagagcttgcgagacacagaggatggtcaattgacacaatcaatttcatgacaaaggtgttttttgatctcggttttgttaaaatagaagatggtgtgctgtctgtcgtgagcggcgcgaaaaaacgcgacctggcagattcgcaaacctatcaggtaaaacagcagctgatggaattagaccagaagctcaattattccgcagcccatgagctgaaggaatggctgaataagctgatgaaccaaggttcagaagcttatgaaagtacgaggaggacatagaacagatggatcttaaaaaatacgtaacaattgtgcccgattacccgaaagaaggcgtacaatttaaagatattacgacattgatggacaaaggcgacgtataccgttacgccactgaccaaattgttgaatatgcaaaagaaaaagaaattgatttagttgtcgggcctgaagcgcgcggctttattatcggctgtccggttgcatacgctctcggagtgggctttgcgccggttcggaaagaaggaaaacttccgcgtgaggtcattaaagtcgattacggtttggagtacggaaaagacgtactgacgattcataaagatgcaattctgccgggacagcgcgtgctgattactgatgacttgcttgcaacaggcggcacgatcgaagcgacaattaagctggtcgaagaactgggcggcgttgtagccggtattgcgttcttaatcgagctttcttaccttgacggcagagacaagcttgacgattacgatattttaacattaatgaaatattaaccgcatatggaaaaaagcactcgtgtcagggtgcttttttcctattatttcatcatcctgacagattctttaggtgttttgaacttctgccctttacatctctcgtttttttcttgataataaactaatacagtttacatttaaaaaaggtgattccatggcgaacgaacaagtattgactgccgagcaagtaatagataaagcgcgcacttatctgccggaggagcagattgcgtttgttgagaaagcttacctgtatgcgcaaaacgcgcatcgcgaacagtaccgcaaatcaggtgagccgtacatcattcatccgattcaggtggcggggatcctcgtcgatctggaaatggacccttccacaattgcgggcggatttctgcatgacgtggtagaggacacggatgtcaccctcgacgacctgaaggaagcattttctgaagaagtggcgatgcttgtcgacggcgtgacgaagctcggtaaaattaagtataaatctcaagaggagcagcaggcggaaaaccatcgaaaaatgtttgtcgctatggctcaggatatcagagtcatattgatcaagctggcggatcgccttcacaatatgcggacgttaaagcatcttccgcaggaaaagcagcggagaatttcaaatgagacgctggaaattttcgctccgctggcccatcggctcgggatttctaaaatcaaatgggagctggaagacaccgctctccgttatttgaatcctcagcaatattacagaatcgtcaacctcatgaagaaaaagcgcgcggaacgcgaactttatgtcgaagaggttgtcaatgaagtgaaaaaacgcgtcgaagaagtgaatatcaaagcggacttttcaggacgtccgaagcacatctacagcatttaccgcaagatggcgctgcaaaataaacagttcaatgaaatatatgatctgctcgccgtccgtattcttgtcggaagcattaaagactgctacgccgtactcggcattattcacacgtgctggaagccgatgccgggcagattcaaagattatattgcaatgcctaagccgaatatgtatcagtccctgcatacgaccgtaatcgggcctagaggcgatccgctggaagtgcagatcagaacatttgagatgcatgagatcgctgaatacggggtggccgcacactgggcatataaagaaggcaaggctgcaaacgaagaagcgacatttgagaaaaaactgtcctggttccgtgaaattctggaattccaaaacgagtctaccgatgcggaagaatttatggaatcgctgaaaatcgatctgttttctgacatggtatacgtatttacgccaaaaggcgatgtcattgaactgccgtcaggctctgtgccgattgatttttcctacaggatccactcggagatcggcaacaaaacaatcggggcgaaagtgaacggaaaaatggtgacgcttgaccataagctccggacgggcgacatcgtcgagattctgacgtccaagcattcatacggtccgagtcaagactgggtcaaactggcgcagacgtcccaggcgaaacacaaaatccgccaattctttaagaaacagcgccgtgaagaaaacgtcgaaaaaggccgtgagcttgtcgagaaagaaattaaaaatcttgattttgaagtgaaagatgttttaacactcgaaaatcttcaaaaagttgccgacaagttcaatttctcaaatgaagaggatatgtacgcggcggtcgggtataacggcattaccgctcttcaggtggccaacaggctcaccgaaaaagaacggaagctgcgtgaccaggaagagcaggaaaaaatcgttcaggaagtcacttccgagccgaaacattatccgcaagggagaaaacgggaagcgggtgtgcgcgtaaaaggcattgacaaccttctcgtccgcttgtcgaaatgctgcaacccggtgccgggcgaccatatcgtcggttttattacaaaagggcgcggtgtatccgttcaccgggatgactgtccgaacgtcaaaacgaatgaagcgcaggaacgtctgatccccgttgaatgggagcatgaatcacaggttcaaagacgcaaagaatataacgttgagattgagattttggggtatgaccgtctcgggcttttaaatgaggtgctccaagccgtaaatgaaacgaaaaccaacatctcctctgtctccggcaaatccgaccgcaataaagtcgctacgattcatatggcgatttttattcaaaacatcaatcatctgcataaagtggtcgagcggattaagcagatcagagacatctattcagtccgccgggtaatgaactaaaaggagcttgctatgaaattagttgttcagcgtgtaacagaagcgagtgtgacggttgacggcgctgttgccggccggatcggacccggtattatggcgcttgtcggcatcactcatgaagatacagaagaagatgccgcttacttggcggataaaatcgtgaatcttcggatttttgatgatgaaagcggcaagatgaatttatcgcttttggatacgggcggggagattttatccgtttcacagtttacgctttacggcgaaacgaagaaagggagacgcccgaattttatgaatgcggctaaaccggatcaggctgtgctcctttatgaaaagtggaacgaactccttcgggaaaaaggagtcaaagtggaaaccggaatattcggagccatgatggatgttcagctgacgaattccgggccgattacattgattatggattctaaacaataaaaaagctgccgttcggcagcttttttttatgattgaaaataatgttccaatccgctttcaattccgtctgtcactttttcctgataagagccgctatgtatgattgtttcttcttgcggttgactgagatagccgagctcatacagcatggcaggccgtttattttccctcaggacgtaataatcgccaaacagaacgccgcgatccgggataggggaacgcttcactacttcagaatggacgtctgaggcaagctggcgatccttagacggactgtaataataagccgtgcttccccgtgttgacgtatcggcatagctgtcatagtgaatgctgataaaggcatccgcattccggtaatgagaggttgaaaccctagcctgcaggctgataaaagtatcatcctgtctggtgatatacacgtttgcaccggccgcccgcaatttttgggccagcagcttagcggttttaatggttacgtttttctcaaactttccggagtagccgatcgttccgctgtcttttcctccgtgtccgggatcaacgacgatcgttttgtttttaagtgagccgctgccgcctgacgtgtcgggagaaggtgcttcacctgtttcctcaccgctttttgacgtttgtacgacccagtttgccacatatgcggtttgtccgttttcaagccggacttcataccatttgccgcttgagccgacaatcgggtaggctgcgcctttatctgctctttttacgatagaagcggaagttgaggccgagctccttaagttggtgccgccgtaaacaatatacgcttttttcgaggagcctgagcccgcagaaccgtctcccgagccggatgcgctgtccgatgagtcagaatcctttatgatgtagtggcttgctgcccagcctttttgcccgtttgcttcaattttcagccagccgtggtcttcacttaagatggaaacctttgttccgcgtgataatttagtcataatcgctgaatcatgtgacgctgcacttctgacattcaatgaagaaacgccgacagtcccgttttttgacccgcttcgggccgaagttgctttcgtatccgatccgccgctgtccgcggtgacgtattcggaagaaacccatccggttgtgccttgataagaaatgttcacccatccgctgttcttgtcaagcacggatgcatgtgcgccttgcggaagtttgccgatgacttcatatgatgtccccgggccttttctgatgcggaggtcaggatcggtggaagtgaccgttccgcttgttgcggatgaatggtctgctcctccggttgtttttgatatcagccaggaaacgacccatccggttttaccggggctcagctgaagctgcacccagtctccctcttctttagcgatcgggtatctttcccctttttttacttcagccttaattccatagctcaggccgggaccgcctctgacattgatcttgtctgtcgcgatgaccgcttctccctctgcggcgattgcggtgtggaatgacggaagaagcgctgtgatgatgacgccgcataaaataagagcaagagttctcttcttcatggctgtcctcctttctgaactaactaaaatacattcttgtataatatcgtattttccttgctgaatgttaaataaaaataaaatggtttgtttatactagtcataaatacagcgaaaaggtgtgcaaatcatgaaatatcaaccaaaaatgggacgcgcgctgcacgatgcggaaggaaatctgcacttcagtgatcagagcgatagagaaaaggcgggttttcttgaagagacggcgacggagttcggtcttttatcgaaagatgcggtcgcaaggaaaaacagacggaataaaacttgacaggggagtgcaatcccattattataatagaaattgatgtacataagtcatgataacgattttgaaccgataatggagaagagtaggtcagaatgcatggagaagagaggaaccgtcccgggctgaaagcggatccgcactgcatctttctcgaaacaacactccggaggttccctgctgaacgcttttgtaagtcattaggcagcggacgtgaacctgcgttaaaggtcagagcggggatgcttcggcattccaactagggtggcaccacgggtataactctcgtccctactatacatgtatagtaggagcgggagtttttttatttgaagaaagacattaaggaggcctgtaacatggcatatcacattccaagaggcacacaggacatactgccgggtgaatcagacagatggcagttcgtcgaacaaattatgagggagacgtgccgcacttatcaatataaagaaatccgcacgccgatcttcgaacatacggaattgttcgcaagaggcgtcggtgagtctacagatatcgtgcagaaagaaatgtacacgtttgaagaccgtaaagggagaagcctgacgcttcggccggaaggaacagccgccgcagtccgcgcgttcaatgaaaataaattatttgcgaacccggtgcagccgacgaagctttattatgtcggaccgatgttccgttacgaacgtccgcagacagggcgtttccgccaattctatcaattcggaattgaagcgatcggctccaaagatccggccgtggatgcagaagtcattgcgcttgcgatgagtatttaccgtaaagccggtttgaaacatgtcaagcttgtgctgaacagccttggtgaccaggacagccgcaaatcctaccgggaagcgctcgtcaaacattttgaaccgcgcatcggagagttttgctcagactgccagtcgcgcctgcacacaaacccgctcagaattcttgactgcaagaaagacagagagcatgaactgatgaaaacggctccgtccattcttgattacttaaatgaagaatcagccgcttattttgagaaagtaaaacaatacttaaacgatctcggcatcccgttcgaaatagatccgaaccttgtcagagggcttgattattataaccataccgcttttgaaattatgagcaatgccgaagggttcggagcgattacaacccttgccggcgggggccgctatgacgggcttgttgaacagatcggcggacctgaggcgccgggtatcggatttgcgatgagcatcgaacgtctgctggcagccattgacgctgagaaaacagagcttcccgtcaatcaggggattgactgctacatcgtgacgctcggagaaaaagcgaaggattattccgtttccctcgtgtacaaactgagagaagcgggcatctcaagtgaaatcgattatgaaaataaaaagatgaagggccaatttaaaacagctgaccgtctcggcgcacgttttattgcgattttaggggaagatgagcttgcccaaaataaaatcaatgtaaaagatgcggaaacaggagagcagcgtgaagtggtgttagacgagctgatacaagtgttaaaggcagatcaaaagcagtgaaggagaggaacgctatgtttggaagaacatattattgtggcgagataactgaaaaagcgattggcgaaaccgtcaaactgaaagggtgggtgcagaagcggcgcgatctcggcggcttgattttcattgatttgcgcgaccgctcgggtattgtgcaagtcgtgttcaaccctgacgtatcgaaggaagcccttgccgcagcggaagcaatcagaaacgaatatgtgcttgatatcgaaggcacggtttctgcccgtgaagaaggcacggtgaatcccaacctgaaaaccggtaaaattgaaatcaaagctgaagcggtgacggtgctcagtacggcgaaaacgcctccgtttccgatcagtgaccaggcggctgaggtttctgaagacgtccggttaaaacaccgctatttggatttgcgccgcccggcgatgtttcaaacattgcaaatgcgccaccaagtcacaaaatccatccgccatttcttggatgaaaacggatttcttgatattgaaacaccgattttaacaaaaagctctcccgaaggcgcccgtgattacttagtgccgagccgggtgcatgaaggagaattttacgcccttccgcaatcgccgcagattttcaaacagcttctgatggtgtcgggctttgaacggtattatcaagtggcccgctgcttccgcgatgaagacttgcgtgccgaccgccagccggaatttacgcagattgatattgaaatgtcctttatgagtcaagaggacatcatggctctggcggaagagatgatggcgaaagtcatgcttgaaacaaaaggtgttgaagtaccgcttccgcttccgcgaatgacatatgaagaagcgatgaacagctacggttccgacaagcctgacacccgcttcggcatgctgctgacggacgtgtcagacatagtgaaagatactgaatttaaggtgttctcatcagccgtggcaaacggcggcgttgtaaaagcgatcaatgtcaaaggcgctgccggcgactattccagaaaagatatcgatgcgctcggcgtttttgccggaaattacggcgcgaaaggtctcgcttgggtgaaagttgaagctgacggcgtaaaaggcccgattgcgaaattctttgatgaagagaggcaggcaaaactggctgaagcgcttgatgcttctgaaggcgatctgctcctgttcggggctgataagtttgaggttgtggctcaatccctcggcgcgcttcgcttaaagctcggcaaagaacgcggcctgattgacgaaagcctcttcaacttcctgtgggttgtggactggccgttactggagcatgacgaggaagaaggccgtttctatgcggctcaccacccgtttacaatgcctgtccgtgaagatcttgacctgattgaaacggcgcctgaagatatgaaagcgcaggcttacgacctcgtcttaaacggctatgaactcggcggaggctcaatccgtatttttgaaaaagacgttcaggaaaaaatgttcgggcttctcggctttacaaaagaagaagcggaggaggagttcggataccttctcgaagcctttgaatacggcgcacctccgcacggcggaatcgcgctcggcttagaccgtttggttatgcttcttgcaggccgcacaaacttaagagatacgatcgctttcccgaaaacggcaagcgcaagctgccttcttacggaagcgcccggcgaagtgagcgacgcccagcttgaagaacttcacctttctgtcaaaagaaaagtgaaacagtaaagatcagcagtttgtttcttgaaaatcaaaatctgctgtgatatgattttgacaagttaaataaagtcctgatgtgttagttgtacacctagttttgaccgaacatttttttgatttgggagcccgtatttttaaatggcgtacatgcctcttttcattcgttaagaggacttacaagatttaaaaaagggcacccacctgctgagagcgggttcaaaacgaaggaaagctgcaacggcacaattgggactttattttttgtgcgctaaaaccagcggctttttgacaagccgagtttataaaaccagaatgtggagtgaggttcttgttacatcagttttccagaaatgagctagcgattggaaaagaagggctggacacgttaaaaaacagcacggtggccgttctcggcgtcggcggagtcggttcattcgcagccgaagcattggcgaggtccggagtggggcggatcgtgcttgtcgataaagatgatgttgacattacaaacgtaaaccgccagctgcatgcgctcttgtcgacggtgggacagccgaaaacagacttgatgaaagagcggatcgcggatattaattcggattgcgatgtcgtcgccttaaaaatgttttatacggaagagacgtatgagcagttctttgagcatccgctcgattacgtcattgacgcgtcggatacgattcattataaaattcatctgatgaaagaatgtctgaaacggaatgttccgctgatttcaagcatgggagcggcgaataaaacagacccgacacgctttcagattgctgatatttcaaaaacccataccgatccgattgccaaagtcgtccgcacaaggcttcgtaaagagggcattaaaaaaggcgtacaggtcattttttctgatgaaagcccgatcgtcatccgtgaagacgtcagaaaagaagtcgggaatgatgaagcgaaaatccgcaaagcgcaaatgccgccgtcttccaacgcctgggttccgtcagtggccggtctgattatgggcggacatgttgtcatggagctcttaaaggacatcgacattaaacgggttaaagataaataaaaagaaaaacagccttcttcaggaaaggctgttttttttatttgaatcctccgtttacacgaaagatcttggccggtatcaaaaaagacaagaacacatagggtgtccttgtccggttattttttctgcttcatcagtttttcatacacttgctttatggcggcttcaaatttccccgtttgtttcggtttatagtattgcttgttttttaacggatcaggcaaatattgctgttcgacccatccgttctcgaaatcgtgaggatattgatagccgatcccgcgtccgagctcttgggcccctttatagtgggcgtcttttaaatgtttcggcacatcgccgattttacccgtcctgatgtctttgagcgcctcatcaacggctgagatggcggagtttgattttggcgagaggcataattcgattaccgcattggccagcggaattctcgcttccggaaagccgatccgttctgcggtctgaatcgcgctcagcacccgggggcctgcctgcgggcttgcgaggccgatatcttcataggcgatcacgagaagccttcttgatatgctttcaaggtcgccggcttcgatcagacgggccagataatgaagggcggcgtttgcgtccgagcctcggatcgatttttggaaggcggataagacgtcataatgcgcatcgccgtttttatcatgagtatagctttttttctgcagacattcttccgccgtctcccgtgtaatccggaccgtgccgtcgcttgattcctttgtggagagcacggcaagctccagtgcgttcaaagcggagcggacgtctcctccgcacccttgtgcgaaatgatccatcgcgtcgtcgtccaccgaaacgctgtaagaaccgagtccccggtgttcatctgtgagcgctcttttcaatgcctgcttgatcagatcgggtgttaacggttcaagctcaaatatctgggtccggcttctgatggccgggttaatggcatgataagggttggcggtcgttgcgccgattaaaataatcatgccgttttctaaatagggcagcagaaaatcctgctttcccttatcaagcctgtgcacttcgtcaaggattaaaatgacctggcctgacattttcgcttcctgtacgacaatctccatgtcttttttattatgaatgacggcattcaatttcctgaatgcgatgcttgtcgatcctgcgatcgctgtggcgatggatgtttttccgatgcccggcggtccgtacaggatcatggatgataagtgctttgcacgcaccattctgccgatgattttatcttctttgaccaaatgttcctggccgataatgtcttcaatattggcaggccgcatccgatacgccagtggtttcatgaacatctctccttacatatacagggtaacggaaaacggacgattagaaaagcgaattgcggcgggccccgtgtttcaatgaaaattaggataagttatgttataataacagttggtctataagatactaaacagattattcatatccatttacttgtataaattaacaattagaattgactggggtgttcatattgaaaatatcgacaaagggaagatacgggctcaccattatgattgaattggcgaaaaagcacggagacggtccgacgtcgctcaaaagcatcgcccaaacaaacagcctttctgagcattacttggaacagcttgtatcaccgctcagaaacgccggactcgtaaaaagcatcagaggcgcttacgggggttacgtgctcgggggccagcctgaagagataacggccggagatattatcagagtgctggaagggccgatcagcccggtagaagtgcttgaggatgaagagcctgccaagcgggagttatggatccgcatccgcgacgctgtaaaagacgtgctggacagcacgacgttagaagaccttgcgagctacacggacggcgagcaggaagcttatatgttctatatttaaaccagaggtgtacagacaatggaacggatttatttagatcatgccgcgacttccccgatggatgagcgtgtgctcgaagagatgaagccccatttcttcggcagtttcggcaacccgtcaagcattcattcattcgggagagaatcccggaaatgggtcgatgaagcgagagcggacatcgcgcgcgaaatcagtgcgaaagaacaggaaattattttcacaagcggcggcacggaggctgataatttagcgattttcggaacggctgccgcccggaagaatgaaggtaagcatatcattacgaccgctattgagcatcatgctgtattgcacgcctgcgaaaagctggaagaagacggctttgaggtgacatacctcatccccggcccttcaggacggatcagtgcaaatcaggtgaaagaagcgctccgtgatgatacaatccttgttaccgtcatgtatggcaataacgaagtcggtaccattcagccgattgacgaaatcggagagctgttaagcgggcatcaggcctattttcacacagatgccgtccaggcattcggttatatgccgattgacgtgaaaaaaagcagaattgacatgctgtctgtttccggtcacaagcttaacgggcctaaagggacaggctttttatatgtaaatcaagaggtgaagctgtcaccgattcttctcgggggagagcaggaacgaaagcgccgcgcggggacggaaaatgtaccgggcatcgccggcttaaaagaagcggtcgtcctttcaaaccgtgagagggaagagaaaacagcgaagtataaggagtttaagaacattatcatgagcacgctggaaaaatccggcgtcacagcggaggtgaacggagatgccgagaaatgcctgcctcatattttaaacctttactttcccggtgtgccggtggaagcgctgctggtcaatcttgacatggaaggcgttgccgtctccagcggatctgcttgtacggcaggatccgttcttccgtcccatgtgcttacggccatgttcggaagtgagagcggcaggctgacttcgtcaatccgtctcagcttcggcctcggcaatacgccggaacaaatcgaaacagccgccgaaaagcttgccgccgtcgttaaacggcttgcttaaaacggcggacttacgtttttaatggagtgaatgcaaatggaaaaacggccggaggatacaagagtcgtagtcggcatgtccggcggtgtggactcttccgtggcggcccttctgctgaaggagcagggctacgatgtaatcggaatctttatgaaaaactgggatgatacggacgaaaacggtttttgcacggcgacggaagattatgaagacgtcatccgggtctgcaaccagatcggaattccgtattatgccgtcaattttgagaagcaatattgggaaaaggtatttcaatatttccttgatgaatataaagccggaagaacccccaatccggatgtcatgtgcaataaagaaattaagtttaaggctttcttggatcatgctctgtcactcggcgcggattatcttgcgacgggccattacgcccgcgtggacagaagcgcaggtacagtgcgcatgctccgcggtctggatgaaaacaaggaccagacttattttctgaatcagctcaatcaggaacagctcagcaaagtcatgttcccgatcggtgatctgcaaaaaagccgcgtgcgggaaatcgccaaagaagcggaacttgcaacagctgcgaaaaaagacagcacgggaatctgctttatcggcgaacgcaacttcaaaacgtttctcagccaatatctccccgctcagccgggcgatatgatgacaatggacggagaagtaaaagggcgtcatgacggtctgatgtattatactatcggacagcgccacggtcttggaatcggcggaagcggcgagccgtggttcgccgtcggtaaagatcttgaaaaaaacattctgtatgttgatcaaggattccataatccgcttctgtattctgataagatcacggcgacaaatgtcagctggacgcgtcccggtctgatggacggcggcgaaatgacatgcacggcgaaattccgctaccgtcaggaagatcacaaagtaacggtgaaaatgacgggtgatgatgaagcggaagtcatttttgacgggcaggtacgcgccgttacgccgggacaagccgtcgttttttatgacggagaagagtgcctcggcggcggaacgatagatgacgtttataaagacggaacaaaactgtggtacgtataacacatgtaaaaaacctcaactcgcatgttggggttttttagcgaaaggaagttaaaaatggattataataaaatcgggattgacgccatgcaggagggcgattttgaaaaagcggcagaggcttttacgaaagcgattgaggaaaacgggcaagatccggtgccatatatcaacttcgcaaatctgctttcttctgtgaacgaactcgaacgggcgcttgcattctataacagagcgctcgaattggacaattcggcggcagccgcttattacggtgcgggaaacgtatatgtgatgaaagaatcgttttccgaagcgaaggatatgtttgaaaaagcgcttcgctccggaatggaaaacggagatttgttttatatgctggggaccgttctcgttaaattagagcggccgaagcttgcactgccatatttgcagcgtgccgttgaattaaacgaaaatgacacggaagcacgcttccagttcggaatgtgcctcgcaaacgaagaaatgctggatgaagctctggcgcagtttgagacggtgatcgagcaggacccaagccacgcggacgcaatttataatgccggggtcgcttacgcgtacaaagaaaatcgtgaaaaggcgcttgagatgctggaaggcgcaatcggcatacagcctgatcatatgcttgcgcttcatgcgaaacagcttatcacccagtcataacaaaaggagggaaggctcgtggatcagctgaacatcgaggaacagccgtatgtaaaaggcgtcattcatacggtcatttatcataatgacaccaacctgtatacagtgctgaaagtcaaggttgcagaaacgtctgaggcgatcgaagacaaggtcgtatccgtaacgggctacttccctctgctgcaagaagatgagacctacacattttacggaaaaaccgccacgcatcctaagttcggcctgcaatttcaggctgagcactttaaaaaagaaattccgaccacaaaagaagggatcattcactatttatcaagtgatctgtttgaaggaatcggaaaaaaaacggcggaagaaatcgtcaaaaagctcggagacggcgcgctcaataaaattctgacggatgcgtcggtgctttacgatgtgccgaaaatgtcgaaaaagaaagcggataagcttgccggagagctgcagcggcatcaggggcttgagcagattatgatctctctgaaccaatacggtttcgggcctcagctatccatgaaaatatatcaggcctacgaaacggaaacactggagaaaattcaggaaaatccttatcagcttgtaaaagacgttgaaggcatcggctttgtgaaagctgacgagctgggcggaaaaatgggtctgtcaggaaaccacccggagcggatcaaagcggctatcttatatacaattgaatcgacctgtctttcagagggccatacgtacatagaaacaaagcagctgataatcaatacgcaaacgctcctgaatcagtcagctgaaggcggccgcgtcacggaaatggatgcggctgacggcatcatcgccctcggggagagtaaggatatcgtcatagaaggagaacgctgctattttccgtccttgttttacgccgaacaaaatgtcgcaaaacgcgtgctcgacattgcggctcagacggagtatgccgatcaatttcctgaatcggaatttctgcttgcactcggtgaactggaagaacggatgaatgttcaatacgcaccaagccaaaaggatgccattcaaaaagcgctgtcttcaccgatgcttttactgaccggaggacctgggacggggaaaacgaccgttattaaaggaatcgtggaattatacagtgaactgcacggagtatcgcttgaccccggtgattataaaaaagacgaggcgttcccggtgctgcttgccgcgccgacgggaagagccgcaaaacggatgagcgaatctacgggtctgccggctgttacgatacacaggctgctcggctggaatggcgctgaaggctttacctacaatgaagatcagccgatagaagggaaactgatcattatagacgaagcgagtatgctcgatatctggctcgccagccatttgtttaaggcgcttcctaagcacattcagctcattgtcgtcggtgatgaagaccagcttccttcagtaggaccggggcaggtgctcagagaccttttggcttctgaggtgctgccgaccgtgcgcctgacagatatttaccgtcaggctgaaggatcatccattgtggaacttgcgcatgatatgaaaaaaggactgcttccaaaggggctgaccgcgccgacaaaggaccgctcatttatccgctgtaattcttcacagattaaagaagtcgtggatcaggtcgtttcgaacgcgttaaaaaaggggtatacctccagggatattcaagtgcttgccccgatgtacaggggaaaagcgggaattaacgagctgaatatgcttcttcaagacatcatgaatccgccgaaagaaaaaaggcgggagctgaaattcggagatgtcgtctacaggacgggcgataaaatattgcagcttgtcaaccagccggaaaacaatgtgtttaacggcgatattggcgaaatcgtgtccattttttatgccaaagaaaatacggaaaaggaagacatggtcgtcgtctcatttgacggcaacgaaatcacctttacgaaaaaggatttcagccagtttacccacgcgtactgctgttcgattcataagtcgcagggaagcgaattccctattgtcgtcctgcctgtcgtcaaaggctactatcgaatgctcaggagaaatctgctttataccgccataacaagagcgaaaaaatttctgattctttgcggagaagaagaagcgcttgaatggggcgtcaaaaacaatgatgccaccgtcagacagacgtcgcttaaaaacaggctcacagagcagactgaagagatggatgcagaactggccgccctgcaaaaagagctgccgttcagtgtatatgatgcgaacatcggaatggaaggcatcacgccgtttgactttatggaagaaaaagcgtaaataaaacccggagcataaacatgcgccgggttttcgcctgtggaagtcatttcaaagtatgctgcccggcttcttggcaaaacctatacgtgttcaacaaaaggtggttgatcacactttgagaacatgccatgcagctgaaggacgaacagtatatgacgaaaacaccgggcgcagtctcgggatgatatcggatgtatgtttctctctggacggccggtttctcggtttcgtgctggagcagaaacgcctgtttcataaccgccatctttttttagaggcaagtgatataaaagagatggatcaagaagccgtagctgccggtcatgctcatttgcagcctttgccgaagagctgtttcacctttgaacagattaagatgcagccggtgaaatcgcctgatggtgaaatgttcggtttgctggaagatgtatacttttgtttggacaggggcataatcgtagcatatgaactctcggacggcttcttttcagatctggctggcagacgccaagtgcgccgcgccgccgatacgcttattgaagcggggaaagaaggcatcgtcctgaacggataagaggtgtagtctgtgcttgtatgtccgaactgcaaaagtaaagatatcggcaaaatcggcgtaaaccaatactattgctggggctgcttcattgagctgacggtggccaaaggcaaaattgcgacacatcaagtagaggaagacggcacgttaagcagtcttgatgatttgttttctgaagacgaacgcagtatcaatttttaaagttgaaaggagatacgcgcgatgggcagaacaatgacctctctgttggctttaggagctggagccgttatgtatcgtatggcttctcagtccgatatgctgaataaaaaaggtatgaaacggatgagaagacgagtcatgaaaatgttttaagcagaaaaaaggatacttctccggaagtatcctttttacgtttgtctcgcttccagccgtctggctgcgagagacaggcagtaattgaccgcgaaatacatcagggccgccagcagaaagatcgggaaaaaatatcccccgtcagcgctttgtccgtttaaaatctgcgcgttatgaatcagttcgggcagagcgatgacgaccgcaagtgacgtatcctttaataaggagataaactggctcacaatcggaggaaccatacgcctgagcgcctgcggcatgacgacgagaaaaagagtctgcgtgtacgtcagtcctgaagaacgcgccgcttcaatctgtcctttgtcaacggattgcaaaccgcttctgatgatttctgacagcatggccgattcaaaaatcgtcagcgccgtgatggcggccgcggtaatttccagtttgatcccgatttccggtagggcaaaaaacgtaaagaaaatgattaataacagcggcaggttgcgaatggtttccacaatggccgctataatgcccgagacgataggaattttcgcatagcgcaaagtgccggcggcaagcccgaaaataaaactcaggacaatggagatcagcgcaacataaagtgtgaccaaaaagccgtcccataaaaacagcagatggtcaggtgtataggcgccgctaaaatccatgtttttcactctccttctctaataactctttccgagacgtctttccaaatagtgaaccccgatgctgagcgggatcgttactatcaaataaaaaagcgcgacgaaaatatagacatcaaacacgacaagagtgcttgaggaaacgagatccgcctgatacatcaaatcgagtcccgccaccactccgagtattgatgagtttttgacaaggttgagaaattggtttccgagcgggggaatcacgatttttacggcctgaggaagaatgacgtatctcatcgcctgactgtaggtgaagcctgacgatctggccgcttccatctgccctttggagacagtctgaattccggctctgatggcttctgcgataaaggccgacgtgtatatcgtcagcgcaatcgttcccgcctgaaagccgtccagtctcagcccggcgttcggaagtccgaaataaaaaacgaatgtgatgaggagaagcgggatgttgcggataaattccacatacgcagtgccgatccattgaaggggtttgaaagccatgattctcatgactgcgatcagaacgcccagcgcaaagctgcctgccagcgcgatgaagctcgcaagcaatgtgtgcaggaaaccgtccatatacatatcgaagttttccgttaaaattgaaaagttcatctatgtcactccttataaaacggggatgagcatgcctgctcatcccgcggtcctttctattttgccggttcttctttaatccattttttatagattttttcgtacctgccgtcggctttcatttttttcaaagaggcgttgatttccttgatgagtccggattggccttttttgacggcgattccgtaaggttcatcggtgaaggtttcgcctgtcagctgatattgtttattttcatctgccatgccgtataaaatcgcattatcagttgtgagcgcatctccctgtcccgctttaagcgcagtgaacgcttcggcgtaattttcaaattccagcactgaggcgtcaggcgctttttctctgatgttttgtgaggaagtagagccttttaccgccaatacttttgagccttttcccaggtcttcggtgcttttgatgctgcttccttttttgacgagcagggattgcccggcttcaaaataaacatctgagaaatcaacttcttttttccgctcatccgttattgtcatcgtggcggtgatggcatcgatatcgccgttttgcagcatcggaattctcgtttttgacgtcacttctttaaattccgctttcttctcatcccccagaatatcttttgcgagctgttttgagatatcaatatcgaagccttcaatatcaccggagcttgggtttttcagcccgaataacctcgtgtcggttttgacgccgaagatgattttgtctctgtctttaatagaggctaacgtgtcttttcccgttccttttgaatctccggacgtttctttccctccgcaggcggccagcataaagacggccagcagtgatatcaacccgaatgacaaccattttgttacacgtgacataagcactcctccgtttcttttcagtgatttaaaatacggcttaagaataaacgcgccctctcttcacgggggctttcgtaaaattcagccggtgcagcttcttctaagatggctccgccgtcgataaacacgatgcggtccgccacttcttttgcgaatcccatttcatgtgtgacgactgccatggtcatgccttcctttgcgagtgttttcatgacatccagcacttccccgatcatttccggatcaagcgcggatgtgggttcatcaaacagcataatttcgggcttcatcgcaagccccctggcgatggcgacacgctgctgctggccgccggaaagctgtgaaggataagcgtccgctttttccggtataccgacttttttcaaatagtataaggccgtttcttttgcttcttcttttgattgcttaagcactttgatcggtgcgagcatgatgttttgcagaacggttttgtgcgggtacagatgaaaatgctggaacaccatgccgatattgcggcggaccttatttatatccgttttcttgtcatggatggagacgccgtttaccgttaaggcgcctccatcaactgtttccagctgattaatgcagcggagaagcgtgctttttcccgatcctgaaggtccgatgataacgacgacttccccttttttaatgtgcagattaatgtttttcagcacgtggaaatgtccgtagtgcttatttacatcctgaaatgaaatcatggccatcctccttaaaaaacatgagtcatattgactggacagtttttgaaatcctttaacacattacgatggttatacagatttttatgaatattatttagattatttcgtaatttctgataattatttccgtcaagaggtctgcgtcataaggcggagtttatgaaacgggaataattccggctttctgtcaaaagataaagcaagaggtgaaacgtcatgcttcaaaaaccgctgcagctcttaatgtggacggctgtatgtctgctcgttttgttaacagtgtatgtcttttgcatgctcgatatgttatggtctcccatttggcttgttataaaatctctctttattcctatatttatcgcagtatttattgcttatcttttacttccgattactgaatggcttcatagaaaagggatgcctagaactttaagcctgcttctgatttattgcctgtttttcggcggaatcggctggggggtttataaaggggttcctgttttaattgaacagctgcaggatctgtctgagagcattcccggtcttgccaaaaactacaacagcatgctgaagcatctgcataatcacacggatcattggcctgacggcatgcaccatcgaatggacaaaatgattcagcagacagaaacgtttcttgccggcacgattgaaagcacgatcagaagcatccgtttcgtgcttgattatatcctgatcgcggcgacgattccttttctcgtgttctatatggtgaaggatatagacgtcatgaaaaagacagtctggtatttgacgccgaagtcctggagaaaaagggggagtgaatttctgcgggatgtagacgactctctcggtgattacatccgcggtcagcttctcgtttgttttttgctcgggctaatagccggcgtttcattttggctgttcgggcttccttacccgctgattttgggccttgccatcgggattacgaatgtcatcccgtatttcggtccgtttatcggcgctgtaccggcgttgctccttgcgctggcgatttctgctaaagctgtgatcatcgtaatcgtcacgatttttattctgcaatttatagaaggaaacattttgagcccgcttattgtcgggcgcagtctcagaatgcaccccgtcgtgatcatgctggcgctccttgccggaggagagctcgcgggcattcccggcatgattctcgctgttccggcggcagccgttttaaaagtgacggccatacactttttgcggatcaggacggaacattgacattcgggttctgcttgtctataatttcgagtagaatacatacgaatctcgagtgacggatatgagtacgccgaagccctgtttaagagagaagctccgatacgctgaaaggagcttcagcagaagatcggccgaagctaatcctgagtgcagttaaaggctgccgcagtcctgcgttacgggatgaaaggtgacaggcctttttcggcctgtaatcagggtggtaccgcgagacagctctcgtccctgtgtgaacgcatggtttgcatagggagagagcttttttgctgtcgcaaaagagaatttcgggtagtgataaggaggaatatagatgaaacacttaacttctgctgaagtgcgtcaaatgtttttagatttctttaaagaaaaaggccatgccgttgaaccgagcgcctcattggttccgcatgaagatccgtctttattatggatcaacagcggcgttgcgacgctgaaaaaatactttgacggccgcgttgtgccggagaatccgagaattgtaaacgcgcaaaaatcaatccgaacaaatgatattgaaaatgtggggaaaacggcgcgccaccacacgttctttgagatgctcggaaacttttccatcggtgattattttaaagaagaagcgatcacgtgggcatgggagtttttaacgagcgaaatgtggatcggctttgatccggagctgctgtctgtaacggttcaccctgaggatgaagaagcttatacgctatgggcggaaaaaatcggcgttccggaagaaagaatcatccgtctggaagggaacttctgggatatcggcgaaggcccgagcggaccgaatacggaaattttctatgaccgcggcgagaaatacggcaatgacccgtcagattctgaattgtatccgggcggcgaaaatgatcgttatcttgaagtatggaacctggtattctcagagttcaaccacaacccggacggcacgtacacaccgcttccgaagaaaaacattgatacgggcatggggcttgaacggatggtctccgtgattcaggatgtcccgacaaactttgacactgatttgtttatgccgattattgaagcaacagagcgcatttccggagatgcttacggaaaggacgcagtgaaggatacggcctttaaagtgatcgccgatcatatcagaacggtcgcatttgcggtaagcgacggggcgctgccttcgaacgaagggcgcgggtatgtactgagacgcctcttgcgccgggcagtgcgatacgcgaaaaccatcggtatcagccgtccgtttatgtacgagctagtaccgactgttgcaggaattatggacgctttctatccggaggtgaaagaaaagcaagagtttatcgccaaagtcatcaaaacggaggaagagcgcttccacgaaacattaaacgaaggtctggccattttatccgacgtgataaagaaagagaaggaaaaaggcagcggcatcatctccggaaaagacgtattcaaactgtacgatacgtacggattcccggttgaattgacggaggaatacgcggaagatgagcaaatgacggttgaccataaaggctttgaagccgaaatggaaaaacagcgtgaacgggcgagaaatgcgcgccaagatgtaggaagcatgcaggttcagggcggcgcgttgcgcgacattaccgcagaaagcacatttgtcggctacagtgccgtaaaagctgaagcgaaggtgatcgagcttcttcatgacgggcaattaatcagcgaggcgcatgaaggggataccgtccaaatccttcttgacaaaacgcctttctatgctgaaagcggcggacagatcggtgacagaggagtgctgagaagcgagcaggctgtcgtaaccattaaagacgtgaaaaaagctccgaacggtcagcatgtacacgaaggcacggtggatagcggcacgattcaaaaaggcgcaagcgtgacggctgaagttgaagatcaaatgagaagcggcgtggtgaaaaaccatacggctacccaccttctgcaccaggcgctgaaagacgttctcggcacacatgtcaaccaagcgggttcactcgttaccgaaaaccgtctgcgttttgacttctctcatttcggtcaagtgacgaaagaagaacttgaacgcattgaaggaatcgtcaacgaaaaaatctgggagagcattccggtagcgattgatttgaaaccgatcaatgaagcgaaagaaatgggcgcgatggccctgttcggcgagaaatacggcgatatcgtccgcgtcgtacaagtcggagattacagccttgagctttgcggcggatgccatgtcacgaatacggctgaaatcggcctgtttaaaatcgtatccgaatcagggatcggcgcagggacacgaagaattgaagccgtaacaggaaaaggcgcttatcaggaaatgaacagccagctcagccttctgcagcatgctgcggacgagctgaaatcaaacgtaaaagacgtaccgaagcgaattcagtctcttcaagcggagctgaaggaagcgcaaagagaaaatgaatcattgctcagcaaactcggcaatgtggaagccggagccattctgtctaaagtaaaagacatcggcggcgtaaaagtgctggctgaaaaagtaaatgcgaaagacatgaaccaccttcgcactatggtggatgatctgaaagcgaagctcggttctgcggtcatcattctcggcgccgtgcaaaatgagaaagtcaacctttcagcaggcgtgacgaaagacctgatcgaaaaaggccttcatgccggcaaaatggtcaaacaagcggctgaagtctgcggaggcggaggcggaggccgtccggacatggcacaggccggcggaaagcagcctgaaaaattggaagaggcgctcgcatctgcggtagattggataaaatccgttttataatcctttcaagtagtgtagaatgatgataagatgaggacctcaggctgaactttgcctgcgaatttgggaaagaggtgcaaaacggtgagctcgtttgataaaacgatgaaatttaatttctccgatgattctgctgaaacaaacgtcgaagaagtgctgaatacggtatatgatgcgcttcaggaaaaggggtacaatcctatcaaccagattgtcggatacttgctgtctggagatcctgcatacattcctaggcatcgcgacgcccggaacttaattcgcaaactggaacgtgacgaattaattgaggaattggtaaaatcctatctagaacagcataaagaggcgtaaatacattcatgagaatattgggacttgatcttggaacgaaaacactcggcgtagctttaagcgatgaaatgggctggaccgctcaaggcattgagacgataaaaataaacgaggctgaaggagattacggtctggaccgtttatccgagctgatgaaagactataatgtagagaagatcgtgctcggttttccgaaaaacatgaacgggacgatcggtccgagaggcgaagccagccaaacatttgcgaaactgcttgaaacagcgtacaatgtccctgttgtgctgtgggacgagcgtctgacgacgatggcggctgaaaaaatgctgatcgcggctgacgtcagcaggcaaaaacgaaaaaaagtcattgataaaatggcggctgtcatgatccttcaaggatatctggacagtttaaactaagaggtgaaaaaaatggaacacggcgaaaaacacattacaattgtcgatgatcaaggcaacgaacagctttgcgaagtgctgttcacatttgaaaacgacacattcaacaaatcttacgtactttattatccgattgatgctcaagacgatgatgaaatcgaaattcacgcttcaagcttcgaaccgaacgaaaatggtgaagacggcgaactgatgccgattgaaaccgatgaagagtgggaaatgatcgaagaaacgctgaacacgtttttagcggaagaagacgaagaataaaatgaacggaaaaagccggagcgcatatgcgcttcggcttttttttgtaataaattgccgaatgcacatgaatcatgtagtataagagctgttgggaggaaaatacttgtatgaatatcaatcagactaaacattcatttccgcgtaaaaacaaaaaaatgacgataatactgtcctccgtgatcgctctgcttatcatcatttgcggtgcttttttctatggaaaatctctgctgtctccggttgacaaaggcagcaaaacggcagtcaatattaatattccgagcggttcttccgtttcggcaatcgctgaaattcttgaggatcagcatgtcatcaaaagcaaaaaagcatttcagctgtatgtgaagtataaaggcgcttccggatttcaggcgggattttaccacctgaataaaggaatggatgcggatgcgattatcaaaaaactgaccgcgggatcaacgggatatgcttttcagatctccgttcctgaaggaaaacagcttacgcagattgcggatgcgatcgcaaaagaaacatcatattcaaaagaagagatcatggcgaaactggatgacaaaacattcatcggcaaactgaagaaacagtttcctgatacgataacggacgcgctttcaaacaagaagctcaagcatccgctagaaggctatctgtatccggccacatatccttttaatgatccggatgcatcgcttgacacgattttgacggcaatggttcaggaaacaaacacccgtatcgaaacatataaatctgaactggaaaaaaagaaactttccgtccataacgcgctgacaatggcatcgcttattgaagaagaagccaccgccaaagccgaccgtcacaaaatcgccagcgttttttacaacaggctcgaagaaaaaatgccgctgcagactgacccgacggtattatatgcggccggtaagcataaaagccgggtctactacaaagacctgaaaattgattctccgtttaatacgtataaacataaggggctgccgccgggaccgattgcaaatgccggtgattcatcatgggaagcggctctccgccctgacaaaacggattatctctatttccttgcaaaatcaaacggcgaggttgttttcaccaaaacattaaaagaccataataaagcgaaggaaaagtatatttccaaaaaagacagcgaataaaaggagggcaaaagctctccttttattccattctgaaaggttttatgataaaatatatcgggttgtttacttatggataaagaagtgtcttaagagagtgtccccgcggattcgtcaggggcactcctttttagaacggaggctgtttgccgtgaatgatcggtatgaacaaataaacgagtatataaacgcgatgctgaagcctcggcctgataaagtgaaaaagcttgaagcctatgcaaaagagcaccatgttccgattatggaagaagcgggcattgaagtgctgcttcaaatgctgtcgattcaacaggcgaaaaacattttggaaatcggcgcggcaatcggatattccgccatacggatggcgcttgagcttccggatgcgaatatttacacgattgaacgggacgacaaacgctatgaagaagctgtgaacaatataaaagactttgaaatggaaaaccggattcacgtagtgcacggggatgcgctggaactttctgagtctgtccgtgtcacggctccttatgatgccatttttatcgacgcggccaaaggccagtacacgaacttttttgagctctatgaaccgatgcttgcgccggatggagtcatttttacggacaatgttctgtttaaagggctggtggcgcaaaatcactcggacattgagccgaaaagaagacggaagcttgttgaaaaaattgatcaatataaccaatggctgatggaccggcctgactatcaaacggtcatactgccggtcggagacggcatcgccatcagtaaaaagaagaggtgaaggatcatgaaaaaacctgaacttttggtgactccgacttctgtacaggatattcttccgctcattcaagcgggcgcaacggccctgttagtcggagaacagagatacggcctgagactggccggtgaattttcaagagaagatataaaagaagccgtaaagacagctcatcaggaaggcgcgaaagtgtacgctgccgtcaatgctatttttcacaacgaaaaagtggacgagctgaacggctatcttgcctttttgcaggaggccggcgttgatgcggctgttttcggtgatccggccgttttaatggcggcgcgtgaagcggctcccgagcttaaactgcattggagcacggaaacaacgggaaccaactactattcctgcaattactggggacgcaaaggcgcacggcgggcagtgctggctaaggaattaaatatggacagcatcattgacataaaagaaaacgccgaagtggaaattgaaattcaaatccatggcatgacgtgcatgttccaatcgaagcgttctttagtgggccattacttcgaatatcaaggtaaagtcatggacatcgaacagaagaaaaaagaagcggggatgtttctgcatgacaaggaacgtggcaataaatacccgatttttgaagatgaaaacggcacgcacatcatgagcccgaacgatgtgtgcatgattgatgaattagaggacctgatggacgccggcatcgattctttcaaaatcgacggagttttgaagtctcctgaatacttaactgaagtgacccgcatgtacagagaagcaatcgatttgtgcttcgaaagccgagagacatacgaagagaaaaaagagagctggatagagcggattgaaagcattcagcctgtgaacagaagcatcgacacaggattcttctttaaagaaacggtctattaaaaaggagggtgcaacggatgacagccgtaaatcaaaccatttccaaagtcgtaaacggaaaacgcgtcattacgaaaaaacctgaactccttgctccggcaggaaaccttgaaaaattaaaaattgccgttcattacggagcggacgcggtttttatcggaggacaggaatacggactccgctcaaatgcggataacttctcaatagaagaaatcgcagagggcgtagaatttgccaaaaaatacggggcaaaaatatatgtgacaacaaacattttcgcccataatgaaaatatggacggtctggaagaatacttaaaagcgttgggagacgcaaaagttgccggaattatcgtcgctgatccgctgattattgaaacatgccggagagtggccccggacgtagaaattcacctcagcacacagcagtccctttccaactggaaagcggtgcagttctggaaagaagaagggcttgaccgcgtagtgcttgcccgtgaaacgagcggactggaaattaaagaaatgaaggaaaaggtggatattgaaattgaaacctttatccacggcgccatgtgtatcgcttattcaggccgatgcgtgctgagcaatcacatgacggcccgggattctaaccgcggcggctgctgtcagtcctgccgctgggattatgacctgtatcagacagacggtgcaaacgcggtcgcgctctacgacgaagaagacgctccgtttgcgatgagcccgaaagatttaaaattgattgaatccatcccgcaaatgatcgagatgggcatcgacagcctgaaaattgaaggccggatgaaatcgattcattacgttgcgacggttgtcagcgtgtatcgcaaagtcatcgacgcatactgcgctgatcctgaaaactttgtcattcaaaaagaatggctggatgagctggacaaatgtgcaaaccgggataccgcgcctgctttctttgaaggcacgcccgggtatgaagagcagatgttcggtgaacacggaaagaaaacaacatttgattttgccggtctcgtgctcgcgtataacgaggaaactcaaatggtgacgctccagcagcgcaatttctttaaacaaggtgacgaagtggaatttttcggtcctgaaatcgacaatttcacattcacaatcggcactatttgggacgaagacggaaacgagcttgatgctgcccgccatcccctgcaaatcgttacatttaaagtagacaaaaagatttatccgagcaacatgatgagaaaggggaagtaatcaccaatgggtaagagtcctgtagttataggcatcgcaggaggttccggatcaggaaaaacaagcgtcacccgttccatctatgaacagtttaaaggacactcgattttaatgatccagcaagacctttattataaagaccaaagccatcttccgtttgaagaaaggctgaacacaaactatgatcacccgctcgcatttgataatgactatttaatcgagcatattcaagagcttttgaattaccggccgatagaaaagccgatttatgattataaactgcatacgcgttctgaggaaaccattccggttgagccgaaggatgtcattattctggaaggcattctcgttctcgaagataaaagacttcgcgacctcatggatatgaaactttatgtcgacacggacgcggatctccgtatcatcagacggattatgagagatattaacgaaagaggccgttcaatcgattctgtcattgagcagtatgtgtccgtcgtcagaccgatgcacaatcagtttgttgaaccgacgaaacgctacgcggacatcattattccggaaggcggacaaaaccacgtcgcgattgatctgatggtcacgaagattcaaacgatccttgaacaaagcttgatataaaagggttgtgggcatgcgtatcagctttataaaatgcgcatgcccacaatttgcccacgtttttttaaaagatttcattcgccatagcgttaaattggacgatagatgcagtttttttatctttcatgatatgcgaataaatgtcgagcgttgtttttgcagaggaatgtcctaggcgtctttgagcttctttaatatcaatcccagcatcaatcatcaaagctgtatatgtgtgtcttaaattatgcggagtgatttttttcactcctgctttttttatataagtggccattcgataattgaagtttcttgccggttcgggctgacctgtatgatcagcgaaaacaaagtcttcatcaacgtaattgcctcgtttctcctcttttattcgttcttgtacatgcttcaaaacacgtaattgattaatgacttgaggcggaaccggtacgttacggatagatgattgagttttaggcggcatcattttatatttccctcttaacccattcttttggaacaaagtgaatctgacccggataatagactcttcaaagtcaattttgtcccatttgagggccacagcttcgcctatacgcaaaccggaatacaccagtagcaaaaacatcgctaaatcttgaggcctccctttccgttttacagcgttcagatatgctgttatctcctccttttcccaaaattttatatctgcaagatcttcatcaacttgttttgaagaggtgtcttttgtggttttaggaattttcacttctttaattgggttatatctgaagtaggagtctttaacagcttgatccataaccatcttaattacgtgatgaaccccaataagtgtgttctttgcatattgcggcgctatatcattcagaaaattacggtatattttttcattgacgctctttaatttataagcccctaagtgcttctttaaaatgattaaactatcatgtcttgttttccaagagctttctttgacggtgggcttataatcttcaaaccatttatcaaggtaagtggccagtctaatattatcatccttttcaaaaaaatcttgatcaatgttgatttcagcttgagcggctgcaaccatagcttcttttttagtcctgaagcctttctttgttttttcgcgtcttttgttcgtgatgggatcatagtatgtaattctgtattcccaattgtctccgcgttttctataactcgccattgatcctatcctccatttttacttaaattcactttattaatattattatgcaactcaatcggatatttttgtagagtaaagttattttcactcgtgattagttcaattaaattaaaagcttgttgccatgtgataacctgtaaaaattcttactgaatatataactttagtaagaattatggtataatagagaaaaatatgaatattattcttattcgaaattatcgttctttttttgatgctttcgtcaattatcgacaatgtttttcttctggacgtgatatattaatttgaagtggtgattaatatgaataaatataaatttgatgttagagggcatttgaagaatataattgagtcaaaggaagaaccgcaaaaacaaattgctgataaaattggaatcagcgcttcgcatctcagtaaattccttaatgggcaagaaatcgccttgtggatggtactggaaatcgttcgctatcttgataaggataatgaaattgaaataatgcgccagtgctgctatgaagcaacaaaaaagaatataaaaactgcatttgaatatgcacactcaaaaaaactcgattcgatgactactcatttgataggggaaacaattaatggtagcaatcgagagctgagggaatgggctttagtttatggctggcagcttgagtcaaagtattcccgtgtctatagtgaagttgaatatcttgagaagttaaaaccattgaagcctagttcacaagatttaaaaaccctcttgttaattttagaaatgctatgtttttattatagtggaaaatttgatctttctttgcattatgtcgagaagattcacgatatgctgccagaaataaaagacccttttattcaaaaggcatttttaagtaggacggatgaagctcttgctaacatgtatcttaaatttagaaataataaagaacaggcccgggaaagagccgcgaaattaatcgaaagaaacttcagtgtgaattcagtaacaaatggatttttcatttcagggttatcgtacttctatgagtcttatgacaatgcagcttattattttaaaagagggatagaacttaataactctcgagataggtattttgttgccaatgatctaagagagcaactggcgattttaaacatgttttgggaaagacctgtgtcaaaaaagcttatcgtatctgaattcataaaaaatgtagttagacagaataacttggaacaatattatgattatgaggtatactctgcattagctttttactttgatggaaagaaagagaagagcatagagaaattgctcctctcattacatatattctgtgataaaaaagactacttcagagcaaatttaccaaaaatagagttgctaaaattgggggttgattataatattataaagagggaggtgaatattagtgaaaaagactgtcatagggatagcaataacattagtgatagtattagcctttgcttttagtacagcaaattctaatactgaacacaatgaaccacaacctttgcagaatcctggaaacaccaaacagttagctgatccaccggtgggcatgagttacaaagttgtagagccgaaaatcacaaaaactgaaaaaactatattttattaaaaaagacgctgccaaaattataggcatcgtctttcgtgtttttaagaaggatttcctgttttcaaaaaatgaaaaacaggaaatccttagttgccgatttatttttaatcatcaatgcattataatagaacaaaagttcgcataaaggggattgcataaaatgaagacagatatttcactcgatgaatttttggagaaaataaagcaattagccgaccaagaatcaatcagtatcagaactgccctttgattttctgtatgcttttaggacttctaacatcacatttatttcgtcgtcggaaacttctttgccatcaagagttatattataatttttcctaaggttttcaattgacaagtctttttcaaacgctaattgtttttcttcttccgagaaatgttctatattatctaagtctgtaaaaaaataagagcgatcaacagaaaaaaagtctgcaattatatccagctttttcattgaggggtcttgcaatcctctttcgagtttggatagatagcttttagagatacctattgcttcagcggcttcaactaatccaagaccttttttttcacgcaagatttttatattttttcctatgtttttattcaaaaaatcaccttatttctcccgtttattaacgtataatcactatagtcattataccatcgagagttgacaaataatacacaaaaaactataaagggggttgcaaaggagaaaacaagatgttatattttatttagtttcctgacgggaaaccaagagagaggtgaagaaaatgaatttctctaaatttagaagtaagattaaaagcatcagaggtgaacagactgtaagggagtttgcttctcatttgggtttttctccatctttcatatctaaaatcgaaaatgggaaagttaatccaagtcttaatagcattgaaaaaatttctaaaaagctcgacattccaatgagcgattttttttgaaatcaggtttcctgaaaggaaactagaggaggtataaacattgaaaatcgaacttgaacaatcagatatcgacacaattacaagcgaagtaatcacaaatgtcagcgcagcgctggttcctaaaattcaagaaatgatcatggtactgtctgcacaggatcagttgctaacaaagaaggaggtttacgaagggatacttaaatgtactgctgctaccgcggaagagttgtatttcagtaggccggactttccttcgtttgaaccacctcagcgcccaggcggggcaaaaacccagcgaagattttcgcgacgtgctgttgaggcttggatcgcaaagaactgcatttcgaacgcataaggagggggagcaaatggctaatttccgacaagtttatgtggaattttggcaagacccaaaagtattagaagaattaacaccggaggataaatacttttatttgtatcttttaactaacccaaacaccacccaaataggtgtttaccgtattaccaaaaagcgaatggcttttgatatggggtattcacccgaatcagtaaacagtcttttggaccggtttcaacatcatcataagttagtcgtttataactcagaaaccagagaaatagcgattatcaaatggggaaaatacaacctcaagaaagccggaaagcccatgatggactgcatcgaaaaagagttaaaacagatcgaggataaaacattgcttgaattgatttttcctcacattcctaatgacgttatcagagaagcattttcacgttacgtgaacgatacgtacgacgatacgtcgtcgtgtagtggacaagaaaaagaaaaagaagaagaagaagaaaaagaattaaaagatatattgtcgggtaaacccgacgacgcatcttcttccaaaaacgaaaaggacgagattccttacaaactgatcattgatttgctgaacaaagtagcaggtacacgataccgatctaacacagagaaaacaaaaaaagacatcaaagcacgctggaacgaaggttttcgttttgaagattttaaacatgtcattcttgtaaaaacagaggaatggctcaatgatcctgctatgaataagtttctacgtcctcaaacattgttcggtacaaaatttgaatcttacctaaaccaaaaaggaggatcggcgcatggaggattttacaaaggagcgagcagccgcagtccagggcgaaatatctcgcaggatgacattccatactgatgagcacggtaaccctgtttactgcgacaaacacacccggataatcggcggagaggaaaaaccgtatccagttcagctcatggaacttcgggacggctctgtaaagtgtcctatgtgcgaaagggaacagcgcaacaaggagattgagcaagaagctgaggtttggcgccgtcaggtagagagaagggttctttctacacactcactcattgccgatccaactctggaaaaggcaacgtttgaaacatatcactgttacaaccaagaggatgaacagaacaaacgccggatgcttgaactggttgatcagatcaaagcgggcgtaatcatgaacatatttataaccggtgcgtccaatgccggcaaaagtcatctggcaatatcagcgcttaaagaactgaacaaaaagagtcaagaagcatatgcaaaatcagccctttttgttaatagtgacgcgctcatgcggcgcataaaaaattctttcaacgatgattctgaaaagcttacggagtccaaggcaatcgaactgcttacacgagtcgattacctcgtcatcgacgacttggggagcgaagtgggcgacacagataacgagaaaaggacagcacctgatttcattcagagggtttggtatgggatatctactggcaggcaaggcaaggtgacgattgtgacaactaatcttaccggaattgctttagcaaagctttatgacaaaaagaccgtcaaccgccttacagcccatcttgaacaaattgagtttgaagaggcgcaaaaaggcaaagggcgcaagacaccggcttcgctggtttaaggaggtgaaaacagttgatacaggcaatcatgcccggcgtgctgcagatcgtcccggaacgcaaattaacggatgaacagcgcaaaaaagaaatagacgagcttatcaaggttcttgatcaaaaaatagcagactatcagaactttagggggaatgcagtgtgaaacgtggtaaatgtccgacgcgtgcgcaaaaagcaatcattaaggcaaacggcctgaccattgaaaactggctcgtcttggagcatctacagcacgagcatcgtctcatattggttcaccgctatatgaattacaaaagggagtgtttagcatgagtcaggcggtcaatgccgaacggttcgaactggctttggaggatatgaattatgaatggtcaatggtccagctgaaaaaggtcgttcaatactggcatgatgggaaatcaattcttgatatgtcggaattattaaacagggattcggatgaaatcattttgctggtcatggactttgcaagaaaaaacatcctgcccgcccgtaagaacggtttacgcgctaacaaaagaattagaatatccgagaaaacgatgaaagataaaatgtaccgactacgctatttgtttgaagaaagcccggtgtatatcccttttcaggagctaaacttcatgttttatgacagtgaaatcaggcgtttccgggagctgtgggcggcagatgagtcttatctcaacatagcaaaagagctgaaacggaatgaagacgaaacgttattccttatcatcgaccaggcaaaaaaagaccttattgagcctcgggaatccggcttactcggaaaggaagcgtcagaagatgaacgcaacaaacaaaagcttccattttgaaaaagcaacggtccagcaacttatggtcatcgtgcgttatgaagactgtaccccggaggtacggaacgcggctttacaaatgttgatgatgaagggagcggaagaggtttgggacaggcagaacgaaagcatttaatggaatggcttttgcttatcggctcttatggcagagattttttaaaccgtcagacagatgaagagcttgagcgcttatataatcttcaaatcaaaggcatgaacaaagaataggaggacagcaccatgacagaaaacaaaaacttgcgtcgtcacggtgaagttataacacgggtgatgagcgaagaagaacgccttgagtatataaaaaaacacccaatcattccgacggaaaaaccaaaggctggcatacagctattcccgtcaaactattggatgtaaggacggccgctaaagcaaccgccaccgtatgataaataaaacttcgacacttttattatatcatacggaggctttgaacatgcagccaaaacatatatcaatcaatcaaaatacaagtgtttctcaatttattgagccggggaaggtgtctgtcatcgtgttagacggcaaccaaaacgccgcatatgtcgttgaggcacccgaacatggtaaaacaatcattcaaacagtaaaaggcggcctggctcgttgtgattacgagatcggccacaaattcaaatagcaggggtttcccctgcgggggaggaacggaaaatgattcaaaacgaaattgcccgtaagtgtgaacgttgcggaaaaatatattattcagctcaatgggttgtatgcaaaacatgtcttttagaccgggaggcccgggcatgaaagaattcaaaatcaatttgtcaaaaggtgaggttttatataccggctcttacatttgcgccctttcaaaaacaccagccagtacacctgagcaaatttctttagaagcagcagctgaaaagctcgcggaagagttaatcatgcagcaggctatgaatcgggagcatcagcggcagcaggatattgcggccaatcaattccggcaggcacagaaagatattaagttgctgcaggcagagaacaagcgttatagaaacgcattagaattttacgccaatgaaacgacgtatacaaacgaatttgaagactgtccgccagctgtcgaactcgacggaggacaaacggcaagaaaagcattggagggggctgcggaatgagcggattatcacaagaacaaattaacaaaaatttatttgacgaagtccagcggctcaaaaagaaatctaggcatgacgaggaagaaattcgactgctaagggcggagaacaaaaaattaagatcggaaattgaagaactggaacagataacaagagatttcgaatctgcaaatagcgatttggaagataaaatctggggattggagaatgacgcggaatgaaagtgaaacatgttgatcaaggtggtttgaaaagtaactggcgggaatttgttgattttgtaaaatccaatggctttgacatttgggaagattatttctttgtctttcatgagaatgaatgtgatgaggcttatatttttgacgggaatacagaattagatgaatggttagaacgggaattttgggatggttgccattacgagaatagcgaccttgaagactcaatgaatgaatggaaagtctggagacttgtttcggcttctgatgtcgagagttatcctagccttcacaagaaatcaaagaaaacttcgattgttattgatggtgagacactttatagagaaccggtattcataagcgtcgagcagacaatttcagtatcggcttcagccgtgtaagggggaagtagaatgatgccattacaagtagaactgcaacggaacgtgaaggccacgaaggacgaagcaatgaccgtcgaacaggcggccgagcttttaaaggttcacccggactacatcccgacgcttgtcgctcggtctgacgatctgaaaatgatcggcgataccattatcgctaaacgggataaaacaaatatctggctggtcggggcatgcgtggggcttttcttcttcgctgtttctgtcctgccgaatttgatcgggggttaagggatggcaacagcagagcaattgaaacgattgaacgacataaacgatttgatcaagcttatcgcaagcattgatagatgtactttctactgtaagtcaaagaatcggatagcgtatttcaggtttaagaaaaaattgttcttcgttgatgattacacgggggatgatgtttacccgtatgaattgggatacggtcgtgcaaacggcttttcgcatgggggcaacatgtggcaactggtgaacagctttagaaaattcatcataacagggaaaagcggcgagctgagagattataaagaaatatgggcttacagctatgaaggatgtatgaaaatccgtcagaaggcgaaggagatcggtttcattgaaagcgttgattacgcctacagctttggtgaatgggcggatagtaaatgatcgaataccattgcccggactgcgattataaaaaacttgatttagaaatccgcgcagatgcacgctgcccgcattgtgggcgcgtcatgggcgctgaggaggaaatagcgtgaaagataaaagagaaattgaccgattgattgctgaaaaggtgatggggtggcagactcaaacgtttcccaacatcgctgttacatctgcctacacagaggatggagaattgaccattccggagcaattttctccgactaaaaaccttgatcaagcttggtcggtagtggagaaattcaaacttgtgaaaattgaaagagattcaaatagatgtaacgcaccatacctcgcagtaataccgacagagacacaagttttcacagctattgccgaaacgcctcagatggcaatttgtatagtggctttagaggcctgcggcaccgaggtaaaacagtgaaacaggattacaggcaggctttcgaacaagcattggctgtcttccgtgaaaagcacggaccggaaacaggcggcatgctgcttatgtgtcatgtgcatgaatttctacaaaataccgtcggcgggcggaaataagggagcggtacaaatgggattagatattagagtgtttaaaaatttgaaggttgttgaaaatcctcagctggatgaatacggcgacattaaaaattgggaaacggaatggacaccgggtgagagcatgaaatggtcggaagagcactttcccggtcgtggcgaaggtgttgacccagacaaattttatacatgggaagagagtttcagcttccgtgcggggagttacagcggatacggctggtggcgtcggaaattagaagaattcaagggagacaccgcctttcaggagttaatcaattttgcagataacgagggcacgataggccctgtcgtttctaaaaagctggcaaaagacttcaacgaacacgccgatgcggctcgcgaatacgccagaacattaggcgatgcaggggaagtgtggctctacttgtatgatgattggaaaaaagcttttgaaatggcatctgaaaacggagccgtgaacttttattaaaaaatatatcccaccagctggtggaagtagggggaaccgaaatgaaaatagggagcatctcatcaacggaaagtaaaccatgtgcattgtgcaatagaaaaactagcacatataaaatctatgaacagtccaacatagccataaaaattcctctgtgcgatacagaagagagaaaatgtttccgcgtaacagatgtgaaagacatagctactctcgctttgaaaatgatcaaaaaagttataccgggggcagcggaatgaaccacaccgacaacccgatcatttcagccgtcatcagcaaactaaacgcacaacaggaaaaggggcttgccaagtacggccagcccgtccaagttaatgcctatgatctgcgcggctggttgcagcacgcacttgaagaaactcttgaccaggcagtctatctggaagcggctatccaaacgctgtacgacaatcaaaatatcaaagaagtcatcaaagggttcaatgaaatggaagcaggtagggaagacatcaagagactaaatcgtccctgtcattacgacggttgggaccatgcaatgtcacattttaaacagattctcaaatcagctcaattattgaagggggaagaacaatgaaattctatgaaatccatgatccatattacgcgcttctcaaagcggaagacaaggcggaagccgagaaaatttacattcaggaagtcgccaatacggacgattacgacaattttcaagatgaagaaatcaatgaggtaagccgtgattatgcccttagcgaatacaaaagagtgatgaaaaaagaaggcgaaaccgatcatgatctgattatggaaacgtttaatgttccggcgagtgaaatgcttgtttgggacggttcactagcatgaacacagcatacagagtgtgggacggcgagaatatgcattattgggatgatgaggggttaagccttgaactcaaaggggacaattggattttatggcgtgatggttgcagagttattgttgcggaaagttatgacagaaattccgttctcatgtggggaactgggttgaaggataagaacgacggagacgtataccaaaaggatattactgaggaatcgtatgtgaatcctttactcaaagaaaatgttattgaccgttatgttattgagagacggaaaggtatcgacagaatgaaccatgtcagcaagaagagccaattggataggttcttatggtatcgacttgatgaaatcgaggttgtcggaaacgtttttgaaaatcctgagttgttggagggcgcggagtgatggcatacaaagataaatcaattcaacttttcaatctgtttgatgaattgagcgaacaggtgaacaatgtcatgcatgacgcggtgattttcaaaaaacgaaacagactcaatgtgatagatcaaggtgcaaaagaggccgagcggctcacgaaagaaattcaaaagcttgtgaattcgatgcggcggaagaaggtggacacggaatgccaaaagtgaatgagatattaatccgatattattgcgacgactgcgaggaatggacattcttagaaaggccttccagcacgtccgaaatttattgccctttttgtggagaacaaactcttgcgatagattctgatgatttaagtttactggaagaggcgatgaaggagggcgcggaacaatgacagaaaacgaagagctacaagcaagatgcatcgaattggaaacgcgtaacgaagatttagcgcgaacgattcaggaacaaaacaaaatgatccgggggcaaaactggcgaatcatgtttttcgccctctcttgggtcctatatggcgctgtgagtgctgtgaattacttttgggggtgacggaatgaacgaatacaccgaatgcccggaatgcgggaacgaccagattattgattatggagaaatggcggttgagtatgaaacgtcagttaaaacagggaagctgttgaaacggaataaagaagggcattcaatatggtgcgcgcaaaagtgccgttgcggttgggatagttattcagaaaaatatgagtgaggagggcgcggaatgaaatttaaaagctttgacatacatcgtaaagaacaatgggatttaaacaacattaagccgctgatatgcatacacaaagaatatgatagcggttgcggaagtaaaagggttctgtgcataggattcgataaacgtaaacctgtgtttgtttttgctaatccgtttaaatacagatattagaaaagggtgggaaataatgaaaaaactattcaaatcaatcattctatcagcagcattacttacgggagcggcggccgttgcgccgtctgcttccgcagcatggtccggctggcaaaacgaatccgggtacagcgggcgagtgtttacggatgccgcgacttacacggcccgcgcctctacggtggactggaaagccgagaaaaaaggatcaaggacactttattacacggccggcgtatacaagaagcgcagcggcggcgggctgactgatacgaatctggtacagcggggcagcttcaaaacggcaacgcctctgaaatcattcaacgtgaaaacgatccggaataagaccggaaagggaacctatgtcatccagctggactgctactctgattccagcaagcggaactatatcggaacatttgaatcagctaaattttacgtgaagtaatcaaaaatcaatatgtccaagacggagagcctgcggacactgatcattgcacagaattactgtgctctgattggtgtccgttttttatttgaatgggggaagggcattggaagccaagaaaagtgcactgccgaacgctggttttaagaagaaaaagccaacagcacgcaaaagtaccgaaaaaaagccacagaagcttactgagagagatttaaagaacctaatgggaataaacaggccgacatacaaaagaggccgtggcggagcttttagacagaaataataacgggagggatttttgatgaatcaaatgacactgaacatacctcaaattgacgaagaagcaacgagaatggaagcagaaaagctgctcgaacaatatcgcatgtacttgctacaagtgccggaagattttttgccgaaagtgaccgcaacatatagccttgtccctcccagcttttcgaatgaatttcattcctctacagaagacgcagcattaaaacgcatggattgggagattgaaagagaacggtttttaaagagaatgcaaagagcggttaaccggctttctcaaaaagagcggcaaatccttgtcatgctctacatgcagaatgaagagatgtatgattatgaagtctatgcagaaatgcgaatcagccagcgcagttactaccggacaaaagcaaaagcattttaccggctggcctttgctcttcgtgcagaagtctacaaagacgggggcgacgctgcatgaattttgttcagccgataagggatttagatcagatatattatattaaaaagtacctgaaagaacggagcgaacggaatcaccttctttttgtggccggaattaattcaggtctgcgtatatcagacttgcggcttttaagggttagggacgtgaagcgcatgtatatcgacctgcgggagcaaaagaccagtaaacaaaagcgaatcaaaatcaataaagcattaaggaaggcttttgccgattatatcaaggacaaggatgatcaagaattcttgtttaaaagccgcgaaggactaaataaaccgataagccgcagtatggcatataatattttaagggaagcggctgattatgttggccttgatggtatcgggactcatacaatgagaaaaaccttcggatactggcactataagaaattcaaagacgttgccttgctgcaggagatatttaatcattcaagccctgacattacgctcagatacatcggaattactcaagacaccatggatcaaacaatggatgcattcagcttataagctcatctgtttaaaaaacagacgggctttttttatgccttttcctatgaataaaccatattgagaaaatgtcaaactcattttagagaaatgatttaaacatagtggtggcaaaggattcagcgattcggggaattggacacaatataagttatgattaattgggtatgtggaaaatcttgtccgtttttcgtggtatcattaataagagatgagggaggttgttgcgaagtgaaacattgtccgaagtgcaacccaattactgaaatggagctgctcgttgcacatgaagaaatgacatatagtctttatcgctatgtatgcccagcatgcaaaacgactgacgatgaagcggacctaattagaatcgaacatgataatttgtagattgtgggataaatagaaaaattggaagtttttcgtggtatcatcttttacaggaggtgagcggcatgagtagaggcgcaacaggttcagcgttagaagagaaaggcatggtttgatagaacgataccaagtaatgaaggggtgagcgggatgactgcggcagagcaaaaaggaatgtactaaaaagattttggcagaaagatggcacgataacggcacaccattttgttttagataaggtattatggtagtaggtaataaatcaaaggaagcggcactgctgatgagcggggtcgcttttttatgttctctgtaaactgcgtccggtaaatctcagggagaacaattggcggttaacggcttgagtgcggggacagtttagaaagaatataccaagcgctttcccaatcgggagggcgctttttctattggagggattaaccatgaccgaagataatttatatgtcgatcaatttaaagcgtggcgcactgaacaagagcttcttttgaaacagattaattatgacattgaaatcagtcaaaggaaaatcgaattgaacgagaaacaaaagcagttgcacctgcaacgcgtcaatataggaattcaggagtttaataattgggcagaaacttctaatcgtgacgaaagactggaactattaaagggggatcaaatagatggcatttgacttgaaccttgcacatatgagtatttctgatttgttggaaaaagcagcagaaagcaatgaggtcattcatgtcaaaccaggtcggcaaaggtgtatagggaaaacatctgcactaattgattttgcacgaaaaaacaaagctcctgtccttacgaatcgagcaatggcagatcactataaaaagatccatccagacttaatctttattgggtattgggatggaaaggacctatcagaatatgaaagcattgtgtgtgacgaactcattcctttagaggttgcagaggaattacataaggacggaaaattattaaccggctttgtgaatctaggaaaccatatgagcacccaattttaaggaatagagggataaatcatgaaaccttttagcaaatgcgaacaatgcggagcaaatcacgagatcgaattatttgagtgtaaagaagcaaatagtgtcgttgtggggttcattcaatgcccagcttgccatcataaaacggtttactctgtaacaaatcctcatatcagatctcttctaaagaggataagaacaataagaaaccaatacagaaaagcaaaaagagtaaagaaagctgccagtctccttactgaatatgaaaaggtgaaggcgcagattgaagttcttatgaaaccgttaattgatcaaaagaataaaagcattaatcagtagcgcctttctgctctttggaaaggtgttttatttttttaggaggtcaccatgcaatttgatgaggatttacgcgtgcaagcttataacactgccacaaagcacaatataactacagcaatgatacatgagggtttataccaattgcgtgtctcaggttgcccttggcaggatgctgatgtcgtagaggctttagggtaccttggtgactatggattgcataacctattagcagttgaacgtattgcacgtataagcgaaatgcatccatacagtaaggttaaaggattattgcatcttccatatgagagtttaggggttaaagatagggatgagaaaggggaattcataccaccgaggctattatggaaagagaacttttataacaggaatgagcgaggtggaagggatgccccttaaacctctaaggatatgcgctgctcgcggatgctccagtctcacccgtgaccggtactgtgatacacacaagacacaacaacaggaagaaataaaacattacaacaaacattcaagaaacaaaacaataacaagtttttataaatcaactgaatggaaacgaacaagacaacttgctttgatacgagacaattatctctgtcagcattgtttgaaagatcattgcttcactccggctgacatggtgcatcatatcgtggaagtaaagcaagattggtcgaagagattagacataaataatcttgaaagtttgtgtaatgcctgtcacaacaaagcgcacggcagtaagggctagtgaccatcccccccctaacaaatctcttgaagggaaacgaacggagaacggcgatcccccttctgcaaacaaacaccgcttttcaaagttccggaaacagcagaaagccccctcagcaaatttgccgagagggcttggtacgactggttttgttgttgatttcatcgtaacacgattggcgaaaaaaacaagcgaaaaatgcaacttttttgatacgaaatgaggtgagtacatgccgaggcctgcaaaatccgcgacgcttcaattgatacagggaaacccaaataaaaagaatacggaagagctggcagcccgggctgagcacgagaaaaagatgaaaatgcgatccgataatataaaaccgccaacgtggttggataaagtcgggaaaaaagaattcaaacgagttgctgctttactggctgaggtcgagatcatcacggaagcggacatcagcatgttggccgcctactgcaacgcctactctcagtatatctctatatcaaaagtgattgaagaagacgggattatggttcatacagaaggcaaggatgaagagggcaatcctatcaagttaataggggaagaacaccctttattaaagcggcaaaaaaactattatgatcagatgaaatcggctgctaatgacttcggcctgactccgtctgcccgggcaaagcttgctatcactcgtacacaagaagaacgggagaaaacagctgcagaaaaggagtttaaaaatgtatgaatacaatcaaacagtttctacttgattactcgcgcgatgtgatatcgggtgagattgtggcatgcgaaaaacacatatgggcttgccagcgttttttaaatgatgtgagtagggaaggcacaagggaattcccatatgtgtttgatgacgaaaaagctcgtcggttcctttactggatgacacaatttaaacatacaaaagggccattacagggtgaaaatattgttcctgaacctattcaaattttcatctttggtaatgtgtacggctgggtgcataaggataccggctaccgccgatttaaaaaggtatattggcaggtcggccgtaaaaacaccaaaacccagagcctggcctgtgttggttcctatgagacgatggccaacgatgaatatatggccgaggtatacattggggctacaaaaaccgaacaagcaaaaatctgttggaatgaaattaaggcgcagatcatgcaaagcgaccttttgaacaagccggaaaaaaaatatcggattgcatatgggaaaattgagcaccccaaaacacagtcgaaaattgaggcgctttctaaagatgccgggaagaccggagacgggtttaacccgcaatgcggcatcatagacgaataccatgctcataaaacctcagaaatttatgacgtcctggcctctggtatggccgcccgcgcccagccattaatgttaattattacgacggccggctttgaattaaataatcctgcttatcgtgtggaatatgactacgtgtctcgcatactggacccgaataaggtcgaacagaacgagcaatattttgtaatggtcaatgagcttgataaaggcgatgacgtcaaagatgaaaagaactggattaaagcgaatccgattgtcgctgccaatgagcacggtttgaattatttacgtggggaattggaggtcgcgcttgctgtcccggagaaaatgagaaatttcatgacaaaaaacatgaacatctgggtaaacatgcgagaaaacggctatatggatatgcaggcctggactgactgcggctctgacaaaatgccggatctaaaaaacagggagtgttacgtcggaatcgacttgtcaaaaacaattgacttaactgcagcatcttttgtttttcctttggatgatgggcgggttgctgtggaaagccacggttttatgccggaggatactttttttgagcgaatgaaaaccgacaacgtcccgtatgacacatggaaagataggggatggcttacgacaactgacggcgctgttgttgattatgattacatcagggcttacatcagaaagatggagcaggaaaacggctggcgtatcaaagaaattggatatgatccatacaatgcgacgcagtttgctcagcagatggaggcggacggatatgtaatgattgaaattcgtcagggtgttgctactctatcggaaccgactaaaggcttcagggctaaggtgaaatcgaaaaaagtcattcatccgaaaaattcactgctaacttgggcgatggggaacgcagtaaccaaagtagatgctcaagagaatatcatgctggataaatccaaatcaacacaacggattgatcctgtagccgcattgattaatgcttatgtacgagcttctcaaactgataatgaagtagacctgaactcatatatcaaatcagcgtcattctctttctaagggcggtgtaatcgtgaaaaaaatattcgcattcatgctgcttctgctaaacgattttctttttatcacaggtgcagcatttatagcgtgcgccgcatatcgcttgcatacaaacatcggtcttttgacgacgggtgtcttttttatattttatgcggtgttaattagcaaaaaaagggggtgattgattgtttttggaagggctgttttcaaaaagatcaaatgaatcagagacttggaatcttgcgaaccctcctgactggatcattgatatgttcggcggctcaaagacggccagcggtgaacgtgtgagcgaatcaaccgccttaattcatcctgatgtctattcatgtgtgaatgtattgtctgatgacattgctaagctttcggtccatacgttcaaaagtcgccaaggtgatattatcagcagcatgaaacatcctgttgctcaattactctatttgaaacctaatcgttacatgacggctttcacatggaaaaagctaatgatgattcatgtctgtctttggggaaatgcctactcttatatcaaagtggataaaacaggtaaaatcatagccttattaccgttaaatccagccaatacacaggcctatgtaaatccgaacaacggtctactgtggtatgaaacggtcattaattcaaaaagtgttgaattgtatgcggatgaggtcctgcatttcaagggtatgacagaagacgggattaatgggaaaagtccgataggcgtcataagggaacatatcggtgctcagtctgctgcaaccaaatttaatgcgaaattgtataaaaatgatgctactccccggggaatattgaaagtcccaaccttaattgatgaagacgcaaaaaatcgggctagagatgaatgggaaaaagtcaatgcgggccgcaacatcgcaattattgatgccggtctttcatatgaatcaatttcaatgcctttacaagaagcgcaatttgtggagtcgatgaaattcaacaaagcacaaattgcgtctatctataaagtccctctgcacaaaattaatgaactggatcgggctactttcaacaatattgagcaccagtccattgagtatgtgaaaaatacgctgcatccttggctggtatcctttgaacaggaaatcatcacaaagctttttactgatggtgaaataaatgaaggattttacatcaaattcaatgtaaacagcgagctgcgcggtgatgcaaaatcaagggccgagtattacgaaattatggaacggatcggcgccttaaatatcaatgaaattcgtgcactggaagagaaaaatgcgattgaacacggtgatcggcaccttgtgtcgcttaactataccttccttgactcactggagcagtatcaaatgaacaaagctggctcaagtaaaggaggtgatggcaaacatgagcaaggaagtacgtcatctgacaacgaaaattgagttgcgctctgccggtgaaggcgaagaaaaaaggcattttattgaggggtacgctttgaaattcgaaaaatggtccgagccgttgggaggatggtttaaagaaatcatcagccggaatgccctggattccgcagacctttctaacgtagtcgctctttttaaccaccgtcaggattatcccttagcgagaaataccgtttctgaggacgtagggaggctggagctagaaacagacgcaataggtctcaaattccgttttatccctacagacacgtcatacgcgaaagatttaatggtgaatgttagaagcggagtcgttaatcagtgttcttttgctttttctttggattacagtcaaggagatccggacgaatggcgacataatgatgaagaggacatttatgaacgccgcatcaataatatcgaacgtatctttgacatttctctcgtaacgacgcctgcttatagcgatacggaggcagtgattggtgaacgcagtttagaaaaagtggagcagttaaaagaaatgcggactgccccaattgaaaaattgaaaatggaacttgagcttttagacctcacattgtaggtctatttttatgttcaaatataaggaggatacctgaatgccagtagcaatgacaaaaaaggaacgtgaattaagacaaaaattcacacagaaaaaacaagaggcatccaatcttttggatgaaggaaagtccgaagaagcccgcagcatgcttgatgaagcgaaggcgctgcaaagacaaatcgaactgatgtcagaagaacgcgacttggaactgccggctttggatgaagagcgaaactttgtaccggaacttgaacgaaaacctgatgaggaaccggaacagcgcgacatcttaacagccacaaatgagtaccgggatgcttggtttaaagtgttaaccggacgcagtcatgacctcggagaagaagaaagaagtatgatgcagcgtgttctgaaggaaaatcgctcgttgtcttctggaagtgataaagacggcgggtatactgttccggacgatatttcaaaagagattttgaaatccatcaaggaattaaattccgttcggaatctggttcgcgttgtgcctaaaactgctccatcagggagttatacagtccgaaaaggtgtagccggaaaactctataatacagccgagaaagaacaaattaaagaactaaaaaacatggaatttgaacaaatctggtacaacgttaaaaagttcgccggatttttgcctgtttctagcgagctattaaatgattcttttgtaaactttgttcgtgaaatcgtagactggctctctgaatccgctgtagtgacagaaaatgatgaagtcttttatggaaaaggtggggagacgaatgttgaaggcatcattaccagcggcaaatacaaaacgcttaaagcgccatctgtaattacgattaaatttctacgcaaggttaaaaaccagattaaacgcggatatcgtaaaaatgcaaagtgggttatgaatactgaagcgtttgaaactcttgcaaatattgaagataaaaacggcagaggcatcttagctcaagatcctagggacgaagacagcttccttttgttcggacgtccggttgaggtttatgacgaaattgtaactgacgacaagacacaaaagactcatattcttttcggtgattttgaaagtgcatatttcatgtttgaccgtcaaaaattcgaaatcaaatcaactgacgtaggcggagacgcttttcttacggatcagacatatttccgtggtattgaacgtttcgacggaaaagtagtagatccggaggcagccgtcattgtcactgatcttgtcgtcggggaagacgcaaaggtagaaacgcctgaacagtctgctgatcttggaaaataaaaataaaaattgaaattgaaaggattgatcgacatggcgaaattagacaatattctgaacgaaagtaacggtgtattaacttctgcgagggacaacggtaaaggagtgccgatcactgacatttcggttgctgataacagcgaagaaaatcctctctacgtaaaaggcctaaagggtgatccgggtgaaccaggacctcaaggtgaaccgggacctccaggaccccaaggcgagccaggcgagccaggcccgaaaggtgaaaaaggtgatcctgctgtcattgaagagggtagcattgcacatgaaatgctgggcgaaaaatcagttcgcagcaaaaacgttggcagtggcagcatcatgttggatcatctgaacagtgaagtgaaggctgtgcttgatggtatgcaaaaacaaattgatgaactgaaatccgccactcctgcagaatgaaaggcaggtgatgccagatgacagaagcagaaaaaatagaattaaagaaagtgaaaaaattcctccgggtcgatggtgatctggaggatgatttgattttagactttatcgcatcagcaaaagaacatataacaggtgctactggccttacatttccgaataactcagcacgagcagctatgtgtgtaaaagcttttgtgacgcattggtatgaaaaccgggagatcgccggcacgacatccaatcttgatggggtgctgactatgatgatcaatcagttgaaatatgtagttccagaggtgaaggctaatgctgaatgatatgcggtatcgcattcaatttcaaaaaaagaagcccggcggccgtctgcctgtggagggaaatgatagctgggaaacagttattgaatgctgggcaaaggcggaaggcttaaaaggccgggaatattatgctgcagcggccatacaaaaagaaaaaacagttcaatttacaatccggcaccgggaagatatcaatgaacatatgcgaatcgtctttcagggcgattcatatgaaattgaggctatcttgccgaattattcgcggcggcatttcattacgattaaagcgaatgtggtgagccgatgaactttgaactggaattgaaagggtttagagagcttgaatctactttcgctgatctggcccgtaaggatgaaaagattcataaagcagcagtgaaagccggaggggctgttttggctgcggaaattaacgaggaagctccacgctcttccattggcggaagtcatccgcacattgacgatgatattatagtcggcagccgtatcaggcgggatgaagacggagagatatacgcagttgtaggccctacaaaagatacaaaattccgtgttcacttgccggaattcggcacgctccatcaagctgccaatccatttattcaccggagtatggtaaaggcgaatggcaagatgcttgatgctatggaaaaagtcataaaggcgggatacaagctgtgaatcttatcgaacgagctgcacaattgaaaaacagtttatttgaagcgctggaagcccatccggcgcttttatcattggttgaccccggcaatatctatgaattggcagtgccggaagggataaaaagccagccgccttatattgtcgtacaagaattagattatcgaacaaccaaatgggcagacggtaagcctatccaggacagcacgctatatcagattgatgcgtaccacaatcagtcttgtgaatccgtaatggctgctgtcgttgatgcaatgggaagttttgatttccagacttatggtcctattaatgagtttttacaatctgagcgcctcattcgaaaaggttatcggttcgaggccaatattttattataattggaggttttatcatgcccgaatacagttctatggtgggattggaaggcgttaagtattcaccattaatcaaaaaagaaggcttgtggatcgccagcaagatcattgattatccacatgctatcaacgcaaagatggcaaccgattcatctacagaaaaacagtacgcagataacaaagtagctgatttagctgtctcgactggctcaacgaaactcgacttagaaatgcgagacgtaccgccggaacaccttgtcaatttatttgggatagaggaaaccaaagacggtctatatcttttcaagaaaaacgttactccgccgtggatcgcgattaccttctttggtgtcaaagcaaacggaaaaaaacgtcatgtaggcttagttcaaggtcgatttactttgccggatgatgactggagtacaaaaaaagaaaaaatagacttccagacctctaaattgtccgcggagtttcttgaaagagagcaggatgacgtgtataaaatcatcgcagatgaagacgcgcctaatttcgatttagacaagttttatgaaaaggtatacggcaacgcctacacttcatctaaagatgaacccaaagcaagtaaaagcactgatcttggcgcttaaaaagggaagcagagtgcttcctttttagtttctataacaattaaaaggaggagtcgacatggctcaaaaacatatttcaatcaaactatggttcgaagatgaaaagaaattgaaaacatttattgcacctcggacaaatacgaaaacacttattgaagcattacggttgaacgcagaagctgaaaaaacagcagaaaatttggagaaaagcatcaagattcttgaaaaacagctgcaatttattgttgggctattccggaaccaatttacttacgatcaattatttgaggggctggaatcttttgaagtgactaaggaaataagccgcattctctcggaagttgccggctataaaaaaattgaggatgctgatcaggattttttgccggaacagacggagaagaatacacctacgagcgcggaatagagcagataaatgaaatttacgccactctcctacaacaagggtggagtatgagtgcaattgacgagatggatatatatcactatttagagatattgaccgaaaccaataaaccagaagaagtgaaatttgaagatgtcttcttttagacgggcttttagcctgtctttttttgttgaatctttgccaggaaagcggggtggatacatatggctcaaccaataggaaatatggtcgttaaggtcggccttgatgatacaggatttaaccggggtattgaaggcttaaaaaggcagatgcgtctggccaattcagaaatgaaggcagccggaagcatctataaaaatgctggtgatcaatcaaagctcctgcaatcgcagatggagggcttgagtaataagtataagattcaaggccggttggtccaagagcaccgtcagcggtatgaagaactggtcagacaaaaaggaaaagacaaccgagagacacagattcaggcgcggcgtttgaatgatgctattgcggttcatgagaatctcggcaaagagctgaataaagtcagcaaagagtttcagaccatgtcagacagcagcggtcgggctgcaggaattttttctgtttttaaaaaggattcaaaggatgtatcaaaagagctgaacgctgtttataaatctgcaaaagccacaggaaaggcattagcgggaattggtgccgccggagcgcttgggatcggtgcaaccgttaaggccgcagcgagcttcgagaaagatatgagccgtgtcgccgccttggcgaacgcaacaaacgatcaattggcatcattaacagaaacagcccgtcatcttggcgccgtcacacagtatacggatgggcaagtagccgaaggcatgcagtatttagcgatggccggctataagacgaaccaaattatcggcgctatgcccggcttgcttgcgacggcagccgccggacaaaccgacctcggcgtaacggctgatatcgtttctgacatcttaaccgaatttcatataaaggcagaggacacaaaccgtgttgccgatgcaatgacgtatacgttcacgaactccaatgccactttgcaggagattggccaaacgatgaaatatgcggctccggctgctaaaacagcaggtctcagtatggaagaattggccgcggcaaccggtattcttgcaaacagcggaataaaggcagacatggcgggtacagcacttcgatcgacgcttactcgtttagcggctccgcctaaacctgcggcttcggctattgaagaattaggtttaaaagtgacagactctaccggaaagatgcgcccgctggccgacatcatggggcagatcacagagaaaacaaaaaattatactgaaacagaacagatccggatcgctaaacagctggccggacaacatgctatatctggatttatcacgctcatgcatgcaggtaaagataagctggaagaattcacaaaggaaatagaaaacagcggcggtattgctgaaaaagtggctgacacgcagatggacaacctggccggatctgtagaatatctgaaatctgcaacaaacaatgccgtcatcaccatgggaaaccagtttataccgatcatcagagctgctactgacggcctgacttcattagtgacatggttcgacgccttaccgaaatccgtcgcaagcacaattgctattacggccggagctgtaacagtattttctctttttggcggggctgccttgctgttaatcggggcattaccgaagatcgcagcaggatggaacatgctccgtacggcggggggatatttaaccggtaacgtcaatcgggcatcggcaagtctcggcgtttatacgactgaagccgttgcggcaggcgccgcatcccgaacagcggcagctggtattgcgacaacttccactgccgcaacggtagcagctacccgaatggaaaggctcaaccaaacaaacaccgtggcaacgacacgagttggccggctggagcaatcggcaaataaaagctcgaaagcgatgcgcgggcttggcggcgcctctcgtgtggccggtactgggcttactcttttcggcggtccaatcgggacaattgccggcctcgttctcacctttgcccctgaactgttaaagttcggcgccggaattatcaaaacaggattaagtgcagtaaaaggagcgggcggatttacgaagcttgcaaaaagcggtttcggcctctttaacatacttaaaaaaggcactgctgttgtcggtcttttacgtggcggacttgggttgttgggcggaccagtcggcgcgctcattacgggtgtgaccctcttagctgatgccggatttaagtattatgacaatttaaagaaacgagtgcttccggcgacaattgattttggagacggtgtatcaaaatccacagcaaaagccgtcaacgcctatgaagacatgaacattgaggttacagccaagctgaacaccctgaaagcgaccaatgctaccatcacgaacgatatcgcagatgacatgtcaaagcgctttaaagacatgggagattctttgaaaaacggatacaaaaccagcgcgaccaatgcaactaaagtgctaaaagaattttatgcttctaataaagggatgtctgataaagaagaaaataaaatcattggcaaaattgatgcttataacgagaaaaaacaaaagaagatccaaaagtatgttgatcgagtagatgaaatttataggactgccgcccgtgaaaatcgaaaaactacggaaaaagagaataaagaaatagctaaaattcaaggcaaaatgcttgctgaaatggaaactgctctctcacgaagtaaggctgagcagataaagatatctaaaaagttgaaagaagaggcgtctaatctttctgctaaacaagcggctgctgttataaaagacagtaacaaggcaaaagagaaaacaattaaagcagctaagaaacaacgtgatgccgttattgatgccgcggatgagcaacgttatgtaaaagggtcaatttctcaaaaagaacacgataaaaccgttgaaaacgcaaggagtcaggcaaaaaagacaattaaagaagcaaaagaaactcataaaggtgtcgtagaagaggcaaaaaaacaagctgctgggcatattagcgaggttaatacagaaactggagaggtactcggcgtatgggatctatttaaagtagacttggctgagagagttaatgctgttactggctggatcaataacattttagaatttatgcacatggatactatcccagagtggaagcctgctggatacgataaccgtcagccttcctctatgcaaattgcaccgggagtagcctatgccaaaggaacagactttcaccccggcggtcgggcattagtcggggaagaagggtgggagcttgctcacacgcccggtatcggcacttacattgtcggaatgggcggcccacaagtgtgggatcttccgcgcggcacgtctgttcttccgcacgctcagtcgaaagaagcagctgccacagggcttcccggttatgcaaatggggtcggaaacttcttcaaaaatgcgtttgagggatcaaaaaagctggtgaaaggcgctgtctctgtcgggaagaatgtcattggcaaaacgaaggatgtcgcttctaacgttatggaaatgattatgaaagggccgcaaaagataatcagcagcattttcaaaggcatgatcccgtttaaaacaggaaccggaattgacgggttagggactggtattctcaaaacgctaaaaagcggtgcccttcaattcttaaaaggggtcttgccggatgtgggattttttacggcagatgcctataaaggcgcaaccggatctgcccaggtccaaaaatgggtaacagaagccgtcggcatcgctggcgtcccgttttcatgggttcccggcttgatcacgattgccatgaaagagtcaggagggaatccaaatgtcgtcaacaggtgggactctaactggaaggcaggtaatccttcacagggactaatgcagacgattccaagtacgtttgcctcaaatgcatttccgggtcacaacaacattttgaatcccgtagatagcgttttggctgctattaattacatcaaagggcgatatggagacatatcaaatcatcccggcttgaaatcaatggcccgcggcggcccatacgtagggtatgcaaagggcggtacttctccggggcgcggcggctccaagctcgccgtcctcaatgaacgagggtacgatgaaaccaccattacgaaagatccggcataccgcgaaaggaacatcggattgtgggcgcgggttgggcgtgagcttggcgtcctgccttctctgcaggaagggatgatctcgaaggctttactattgcttcaaaaagcatccgcggcacagcctgaaaatgataaaagcgtcaatattgatatgactcgggtcgtggaaaatcaagaaaggcaaatcagtatgatggggcagcagatcgacgctctccagcagaacattcagctactgcaacagctgatcttaaaagataacaacacctatattgatggtgcccgagtagatcaaacgagtgctgaccgatatagaagaaaacaatatagaaacgggggtaagccggcttggtaaagctatttttggattttaataacggattgggggagcagagccttgacagcttgctccctcaatttgaagtgttgagttttttggcggaagcgccgattattaatcgggaaacaattacaagcccgcgtcgtcatggagttatcccagcacaacacccacgggatgtgacctattcgccaagaaaagttactgtggagatatatgtggactcattcattcacaataatttttatatgcttaggcatcagctttatgcgttattggtgaagccgtttccctattatatttcaactgacttatggccgaatcgccgtttccttgtcacttgtgatgggaattttagtattccgaaagaaaaagagaagacacgcgcgagcttctcagtggagtttaccaatattaccggaatggcagaatctaaacattcaaccaaaacagcgcaaactcagtcaggagagaactggaatatcggtatgaacctgcggtcagatgacaatctggcctattattttaagaatcaaaaacatttctctgtctttaattccggagacgtccaaatcaatcctcttgatcacgcgtataacgtcctattgaacgccaaggggaagaatgtaacgctaatcaatcataccaatggcgaaaagttaacgattgaacaggagttgaagaagtcacagcaggtatcatttctaaagcagtacgcgttgctcaataataaaccaataaaaacatctggacgtctgccaaatctcgaaattggatggaatgagtttgaagttcagaatgccgatgattttgtcatagaatttgacacgcggctctattacttgtaaggcaggcggtttgtatggcgaatacagattttattaaagagattgccggagacgcccagcaaatatataaaaagcaccgtattctcgcatcactgatcattgcgcaaggatgcttagaaagcgcgtggggcacaagtgaattggcgacaaaaggacataaccttttcggtatgaagggcgaatacaacggccaatatgtcattatgcaaacatgggaagttatcaacggagaaaacgtacaagttccggctaaattcaggaagtacccttcatggaaagaatctatacaagacctggcgaacctgtacttgaatggcctcagctgggacaaaaaccattataaagctgtcgtcggggaaacagattatcagaaagcaactgcggctctcgtcaaagccgggtatgctaccgacccaaattacgcaacaaaattgaacagcctcattttcacctataaattaacgaaatatgatacaaccgagggagtaccagacgaaccgagtaatccgagcacaccagatcctgagccggacataccaagtaaagaatatgacggtaaagacattacgttgaatcaaaacttgccaaaagacgtttatttccctcagctgcatgtttccagtcaagacggaaatcaagtggtcgaagtcataggtgccgatccggatctgctagatgacaccaccggaaaaaaagatattgagtttacaatcactcggactgctgataatggcattgaatatgacttgctcataaatgacaatattctttacctggatgaaaagaaatttaaccatcaaaaatactttattacgatgatcgaaatcgatcaggaaaagacactcagcaagaaagtttctgcaagccatgttttcgttgccgttttgaataatcattatgtagaagagacgatcagcggtacattgactgtaagaaaaatgcttgatttcacattgaaggggacgaaattctcttatattttcaaagacaaggaaagtgaatttgaaagtgtagagcaggagaattttggtgacaagtttgcgaatgaactgataagcgaaattgtggaagactacggtttagaactggatgtagataattacaagatttacatctataaaaagatgggaaagcgtatcaatcacactctcgactctcgttataatatgcccggtattaaaattaaaacatcgacagaaggctgctctacccgggcgcgggggttcggtgcgattaaggaaaacagcagcacagacagcaaaaaaacggagtacgtttttgatccagtcctttacaagcaccctgacgaagataagttcctgcttgatggcatgccgcggtgggctgagccactgcgcaacgagcgttataaaaaagagtccagcatgatgacggcgcttaaaaaatacgtgaatccttacccgaagatggaaatcgaagtggattatgaatacatctatgagccgaagcttcttgaaatacaagatgatttttggaagggagacacacttcatgtgctggctgatacagcatacggtgtgacttatgaagacgatgtccgactgctttccattcaatacaagcccttaaacccatatgcaaagccaaccttgaactttgctaatttccgtaaagatatccaggatatccgcatggagcaagaaaaacgattgaaagatcaaaaacgttatgttcagaaattaagaatgatgatttaaagcacctctattggggtgcttttcgttttagttgaaaggagtgttctaaattggtcaggcttaccaaagactatgataccacccgaaatgcccggtatacatctcaaataagggatgacatggaaactatagaaaatggaataaataaaattgatgatgatcttaaaaggcaccgagcaggaattgccgttcatgattcttcacagattacacatgatgggtacaccgtcgaaaaccgtttgaaaaatctgtttgcgcgatttactaaccttgtactgaatcatgacggtaaagacgtgaaagaagtcgtggattcccgcgtaacgacggatggggaaattgccgcaacattgaaagacaggctcgatagggaattcagcaagcttgacaggaaaatcaaacgcgttgtaaacgttgatgacttcggggctgacccgacgggaaaaacggacagcacggaggcatttaagaaggcattcggaatcggtaaggtgcaggtggttatgtcagctggcatttacgtcgtgaaaggtttgaaaattccttcctgggttcgtctcgtcggtcagggaatcggcgttacattcttaattttgaatgatgagacaccggcctcagaatgggtcattacgaatgcggactacgaaaaagggaatcgaaacattcacattgaaggattctcaacagactggaatcaagaacggcagggtggtttaagggcgacaggcgggcagcattccacatgcgttgcctttgcgaattcaaaattcatctggattaaaaatatagaaaacattaaccccgcacttcacggcattgatataacagcgccaacgtatgaccatctgccagataccgagtatacaaaagacgggtgcagatatgtatggattgacggctgcgttaactcagggtatggggatgacgggataacaacccattacagtgagtatattttcatatcaaactgccattgcacaaacccgacaggcatcgcacatgctgcgggaaaggctaactctaatggcattgagattgatgacggttctaagcatgtatggctgctcaacaactatacagaaggaaacatccgcggcgttgaagttaaggcgcataccgaatggccggcttcccaaaatgttcatattctcggccacgtttcatatcgggacgtgcgggcttatgatttgcggcatatcggccaccataaagcagatgatcctgagagtactacagcttatgatgtgacgttaacggactgcaccgcaatagaaccgatttttaatgatctgtatgagggaattaccccgcgtgctcttgttgtatccgcatataagaacgtgcagattgtcaattttaccgcaatcggaaatcccaattacgattataaaaacagtccggtgatagcctttcagtatcgctgcagaaatatcaccgtaaacggtattaaaatgagagggttcagaaaggcttctcatgatattcgagtgtacggaggcccacaaaaagctgattacgtgaagatctcaaattttgatatttacaactcggctcctgcagctttcggtttaggcggcggggtttatcattcaagcattatgaatggaacgattataggtaaaaacggaactatcggaattggttcgccgaataatcaaacaactattgtaggtgtagaagcagccgggtataagatatctgctcaattggccgggagagagtacagcactatcccgacaagagtaaaaggcggctttatgggcggcaatacttccggatcagctctgcatgaagcgagtgccattttaggcagtacaggtgacaacatcgcaaaaggccctgccaatgttctgctgggtgtccggggcggctcaacaactgaggggtcgcgtcaagcgctaatagccgtcaataactgccacacaaaaggtgacggcaactctagggctattcttgcagctcagggggttatcaacgataacggatacagcgttagaggcggttacgggacaggaactgcctcaacaaaaaatacgagatgggagttggattcgactggcggtcatattcgcggcacagggcgagtcgagagcgtctcagatttcaaagacttcgctgagtattttgagtctgctgacggcaagaaaattgattctagttatctcgttgcactagaaggcgaaaagattcgaaaagcggaaaaagaggacaagattctcggagttgtttcggaaactgcgggcgtggtgctcggcggtgctgcgttctattggaacgagcagtacgaaagaaatgaattcggcgggttggtctacgagacagttttccgcggcggcgaagaaatccgtctccccaaacttaatccagactacgacccttctctcgaatatgtgccgcgtgactctcgggaagaatggcatgtcatcggcctgatcggtcaagtctttgtcaggattgacgaaacagtggccgtaggggatagcgtatcagcaattggcggaatcgcgactaaagcggaaagcggaggatatggaactgttatgagaatcaagtctccgtatgatgcggaaaaaggatacggtgtagctcaaatgattgttacgccgcagcactaaggaggaaaaggaatgtacaaaacggggggcgtcgcatttgacatcaatgcgaaccggacaaacgggcgaaccacgaacatccaattcatgacgcaggacacgggcagcgcgaagctgtctttttcttttacaaaggatggcacgccgttgcccctgtctgctgtagacgcgaaaatcgttctattgtatgaagatgggtcattttacaaaaagagccttgctatcactgacaaggtgaacggaaatgcggaatatatgctttcagatgaagagcttaagcactatggaacggtaaaggctgaaatcaaactttactattcaaacgggcaggcgctggcgacttcattttttaccttctctatcgccaaaacgttagaagatcagaacatcattccaacagctgactattacattgacgattttgaaacgctgagagacggggtaaaccacattgtcgaagaaatcagccagaccgtcgaggaattacagaagaaatttgccgatctgaaagccattgaaacgaaagagggcgcacagaaaaaagcggatgctgcagaggaaaacgccaagtcttacacaaacgaacatgcaaaagataacgtgaaacatatcacggctgccgagagaaaagagtggaatgccaaggaaactccttccggcgcgcaggataaagtaaacgcccatgcgaacgatgccgttatacatgtttctgcagctgatcggaaagcttgggacagcaaggaaacagaagacggagcacaggataaagtcaatatccatgcaagtaacacggatatccatgttacagctgaagaccaagcttattgggatgacatgacccggcagtttaaagcccacaactacaatcaagaacggcatatctcggcagctgaacggaaaacttggaacggggctgccacctatgccaacatcatgctgaagaacggggccgccgcagggacgcggacaccgatgtacgcaaagtggggggcatttttaatcttacgagggcatgtgaaaacagacgccgaaatcatattcggctccatccccgcggcatacgcgcctgctggcggttctgttataacagtgccgttaagtggtacaggcggcacggccaatttaatcatttatgataatggggatttaaaaataaaatacccggacccggcggactcaagtaagatgggcggaggctactatctggatgtggtcgtgggctttcaggaaggaggaacagcatgattcaggtttatgaatacgatgaaaatttcattttgactaaacccgttccgattgagcctgatgaagaaggaaactacacaatccctgagaattgtacaaccgtccagcctccgtctttcataaaggcgatgtatcatcccgctgagaagacatggacggaggcggccacccaagaagaaaaagaagccatggaaaagcaaattgaaagtggacgggtaccttctcccgtcgatgaattgaaagctcagaacgcggccattacaacacagcttgcggaagcgcagagcctggccgagtcacaagcgcaaatgatagccaatctttatctagtgctggcggagggagggaaaggggtatgatggattggtttaaaagcgttaaaaccatctacggatgggggccgcagtattacagtaatgcagacgtggcccattttgttgagtggggaagaattacagaagacgaatacaaacaaataaccggcttgacctatccgatgacaaaacagcctgtcagtgtggatttaggcggcgccgcaaactgatcaacacccggagaggtgttttttattttgcctcgaaggaggtgataacaattggagggaatatacgtgtggatgaattttgagagcttacagatcgcaagagcatatctttttggggaggtgaaatatcttgatttaatgctggtgctgaacatcattgacatcattaccggtgtgataaaggcatggaaattcaaggagcttcggagccgtagcgcatggttcggctatgtgcgtaagatgctcagtttccttgtggttatcgtggcgaatgctattgatacgattatggatctgaacggcgtcctgacctttgcgaccgttcttttttatatcgcaaatgagggcctgtccatcacagagaatttggcgcagatcggtgttaaaatcccggccgccatcactgaccggcttcacgtaattgaaagcgacaacgaccagaaaacagaaaaagaggacaaagctgctgagtaaatccagcggctttttaaattctaaaaatagaataggagacgatgaaacatggtgaaaatcacaaaggactttattccagtaggacacaaaaacagaccgggatacgcaatggacccggcatacatcaccgttcacaacacggcgaacacggcacaaggggcaagcgcagccatgcacgcccgttatgagaaaaatccggaaacacccaccagctggcaccttacagtagacgacaaagagatttatcaacacctacccttgaatgaaagcggctggcacgcgggcgacggaaatggcaccggcaaccggaaatctatcggcattgaaatttgtgagaatagtgatggggattttgaaaaagccgtggcaaatgcgcaatggctgatcaaaaagctcatgaaggatcagggtatttcccttgcaaacgtggtccctcaccagcactggtctggcaagtattgtccgcgcaagctgcttgatcgatgggactcctttaaagcaggtatcagcggcgccccgtctaaaacggtaaattctcctgttgataaaacaaaagaatcttatattaaaaatacagttgttgctgacagccttaatgtgagaactcaacgcaatgccaactcttctattgtgcttgctcttcctaaaggttcggctgttcaatataaaaaaggatcgactcaaaatggttggggttacattaaatataccaattctaaaggagccacatacagcggttacgttaatgtaagctatatcaagagcgatgcagagttagggaaaaccccttcgaaatctgctcctgctaaaccttcaaacaagactagcgggggtattaagtctgtaggcaaaattaaaattgttggtgttaaaagtgcagctattattatggacaaaccagaccgtaaaaacgctaagaatgtggatacaattggtctcggcaagacaattaacatctcaggttctgttaaaggttcaaacaactctaaaggttattgggaagtcatccacggtggcaaacggcggtatgtgtctggacaatatggaaaaatggtttaagtaagctgtcccttgctacggcatttacggctgaagacaaaagcaaagccgaagcgctttaaatataattgaacccccttctatttggaagggggagttttatttctcaccaggctagattaatatcaaaatcgtgaacgtttgtagtaacatctttgtccggccaaaaatcccacttaactctgattgatttgatatcatttggatcatttaatttctttattggataaaggacatatccctctttttttgcccctgacataatttctccgcctatatcttcactgagcgacaaactggcatctatttgttccttagtattggtaagtagtgtgccttggtttggaaaagttgaaatatcctttttgctgccattgtcaataacaaagtgtacggctatagccccttcagcaccagattccatttcgtctttaacgatcccaacacgatcaattttaaatgtggtgtcatttttcttttctgaccaatttaactcatgaaccacggtagagtcatcttcattaccaccttcaaatacggtagaatcatcttcatcgctatcttcttgagcatcagaatccattggctcgatatttgctgatgaaatgggttgttcttcccttccacctagctcttcaactggtttagacataaaagaaaaaccgatgatcgcgagtatcaaagttgaaggaactagccaataacctttttttcttgttttgcgaaaaactaaaaatatcaatccaactataaagccgatcgttgaaaagattgtaagaaaacccataaataaaatcataataatccccctattgtttaaaacagatacttacattttaaagcaaaggaggattgatttctatgctctgtaaaggctttgaagacgctggaataaaggatcgaagacaaatgcgaggctcgaagcgcttttgaaataataaaaaatccccctcttcttatggagggggcaactgacttatgaaacgaccatgttaattatgatgtaagatactgctgaaatgacaaggaacgtgataagagccgcaattcccaactgtttaaatagtttggccttattgacagcctcttttccattcttcttttctttattaattctcaaccatgtaacgaataaataaccaacaatgaaaataggtaaagtgtattttacataaaaatcccacatgatgaccactcctcgggtgttattatatgcaattattgtggactgaatgtaaaggccaaagcccaagttatgtccgcttttacccctttacccttattattagcatctgcgcggtttgccattaacccaaaaaggacgctagctgctccggggatagctcccggcacaaatccaaaataagcagcgaaaacagcaattcctgcagccgtgctgccggcagtattcatgtcatgtacaaagttatcagtagcgcagctattcattttaacatgatagccccaccagtaatgtttagggccatagtttttgcctttacaagcaagaggcgtcatttctgaagatgcagacttcttttcaactatacttaaatcctttttggcttctagtttatcggcccttatctcagcatttaagtagtcaaaataagccttttgtccatccagcaaacctttttcaataccatcagattcagccttctcatagtctaaagcaaaaagaccattcttcactgatacatacttttctagggttaaaatatcttgtttgtcatattgttcttctgagtagcttttcacaggtgattgtttttctaaggcaaggacattcggagccaacgacatcaataaacacaaaaccaacaggacagacgcaaatttcttcatgaaattcctccttatgttatatcctacaattaccaactaaaacatatataggcttggttgtaaccgaaattacaccgaacgaaaaccgcaaatacagcgcaaaataaaaagacctttccaaaaatgaaagatcatttgaacaaatttctcatcatattattggttgcttttcctgcagcgcggcgagcactctttcttcaaggaatagctttttcatatgagtcccctcttgttttaaaccagatgtttacatctttaaaacaaatgaggattcattttttatgctttataaagacattggtagtgtttattatcacactccgaatacggaagcgaaatttaaaaatagactcctttaataaaaaaaatccagcaaatcaatagtttttgttaatattttcatctataattatagtattattaagcgaattgtatggaggattatatatgtgggagattggttatttgattttatgcgaggatatatttaataatggagatgatagggttcataaaaaccctttaagtggtcttcaaccagtgaatatccctggtaatttctcttttaaagtggccttttcaatctttaacacagatttagataacaggaatgagaagaatacccttaggatgctttttaaagatccggaagacaacattctgaatgatacaggagagattaactttcaatttgaaggagaagttccagagggcgcaacatttgaagttggtgaagccggcattggaatgaataatgttgtgttgccagtcgaaggtatctacactttagaagtccgtataaatgataacaaaaaaactttaaaggtacctgttggaaagcagaaggggataaaggatgatgttaatggaaaggattaaattcgatcgtgaaaatcaagaccctgtcttttcatttgaggcttccagatcagagatacctcaagagttaaagaattccataagcgttaagagcagtaaaaaaagtcctgtatcggggtatattgacgagaacgggccaataaaatttataaataacagtactgacataaaacatacgttgttaacagcaggcaaagagactctttctcacaaaggagatgatgggattgtgagctcagataaagacttgtttttcaccgaaattaaaaatgatatgagagagcgagagcaaagaacccgcacagagataactgagcgagagcaacgttttgaaaaacaaatgagtcaattcgctcaagaagcaaaagagcgtgaagagagatatataaatgataacaaagagagagaacaacgaatcatccaactaattgaaaatctggataagaaaattgaaaagcacgcaagcgcaaccgaaagtaaattggatgctaacaccaagcatacagaaacaatgaaaagccaaaacttttggggaaacatagcgatgtttgcaggtcttttagctattgtaataaccttacttgttgcattaactaactaggtaaaagcccttctaattaagggattttatttacctttctaagtgccgctttaaaaaagatgtgggcacctacggagcattcgggttatgttaaagcaagatgttcaaaataatcaagaaaaagcctcccttataggaggcatttatattacctcgaggtttgatgcttattcgatgtttttcatgtagcatgagaagccactcctttccggacgtgccgtgcaggaaaatggccagttgcccacagaatgcccacttctttttataaaacaaagaaaatcagagtaaaaaagaagatgtccattacacctaaaacccttgatataatgctttttgtttgcaaatcaattgtaatggaaaccattgatgaaccattgatctgatggtcacgaagattcaaacgatccttgaacaaaatgcaattttgtaataccatagcatagacataaataactcagaccatattatgtataggctggaagggaatgagacagttcccttctttccctgtttataaaccgaaacatttgcagaaaacacacattcagtttaagataaacagtacctatatgggagagaagaacgaggactgccctgtgttctcattcttgattttttcgtttatgctctcatacataatcacacgttattgttgagggacaaccaccaaggagtgaaggaacatggcacaagaaaaagtttttccgatgactcacgaaggaaaacaaaaactagaacaagaattagagcaattgaaaacggttaaacgtaaagaagtagtagaacgcattaaaatcgcaagaagcttcggagatctgtcagagaactctgagtatgattctgcaaaagaagaacaggcatttgtggaagggcgcatcacgacgcttgaaaacatgatccgcaatgcgaaaatcatcgaggacgacggcggttcaaatgtagtcggtttgggaaaaaccgtatcattcatcgaattgccggacggtgaagaagaatcttacacgattgtcggaagcgctgaagctgatccgtttgaagggaaaatttcaaacgactcgccaatcgccaaaagcctgcttggcagaaaagtggacgaagaagtgacagttcagacgccgggcggagaaatgctcgtgaaaattgtgaaaatttcataagatccgtttaacaatgaaacacctcgtccaaaatgtggatgaggtgtttttttatgatcgtatcaaaaaggctgaaagcggccgtgatttgttttctgctcgtgtttttctttctgcttgcgaggctggctgaaattcagctgtttttcacagaatctttttcaaaatccaatattaatctgattcaggaaagcgtcaagcagcggacggaagaagtccttatttcagacggacgcggctcttttcttgatcggaacggcaaagaactgaccggaaaaaagcagcctgccgtcatactgtttccctttctcgtgacgcaggattggccggttgaccgggtatcagacattctcggaatgaaacagggggagctcaggcagctgctcacggaagcgaaaaaaccggtggtcctgaacagcagaaaaataaaacatttgacgaaacaatccgtgtcaaatataaattctttgaaatatcccggcatttacggcgtatatatgaaagacagcaaggaaacaaacatagccgctcatctgttgggcgcgacaaaccaggaccctgagcttttgaaaaagaaataccccggcaggaaggaactgccgatcacggcaaagatcgggacaagcgggatggagcggacgtttgatgagtttttactggcggatcaggacacaaaacttttgtatcatgtcgacggaaggggaaaccctttattcggaatggacgtcaaatatacggctgaagcaaacgcgttttatccgctgcaagtcaaaacctccatcgaccgcaatattcaaaaagcaatggaagatgtattgaaagaccgcgggttaaaaaaggggggagccgtccttttagacattgaaaaaagcagtgtgctcggaatggtatcaaagcctgacgccgacatgtcaaagcagcagacactgcaaaattacatgctgacgccgatttatccgggatcagtgtttaaaacggtgatcgccgcagccgcaatagaacaaaacgaagtgaagccgggcacatcctttaactgcaatctcaacctgtacggagagccgggggatgacaaaggcacgctcagttttggagaaagctttgctcaaagctgcaattatacgtttacaagtcttgcggaaaaattgatcaaaaaagatgattccgttattgaaaacatggcggaaaaactcggtctcacacagcgggcgggctgggaaggcaagctgtaccgggaagacggattcaggcagctgtataatgaaaaaagcgggatcatttggggagatgacaaagacaaaaccgtaaaaaaagctgtcgcacagacggcgatcgggcaaaaaaacgtgaaagtcacgcctcttgaagtcgccaatatgatggcggcgatcgcgcgcggcggtgaaaaaaaacaagtcaaaatcgcggacaaaattgaatacaaaaacaaaacgacgatggcgtcattcaatgatcagccgttaaaaggggaaaacatcgacaaatatacggcgcagcagcttcaaaaaattctcagagaagtcgtcacctcaccgaaaggaaccggccgaaggtttcaggacctgccgtatgagatagcaggcaaatcgggaacggcccagacgggaatgttcacaaaagaaaaacagacgctttaccacaaatggtttgcgggatactttcccgcggacaagccgaaatacgctctcgtggtgctgcacatggacacgccgggggataaggctctgacaaatacagtgttttatgatattgttaaaaaggtacatgaaaatgaaataaatcagacatagaacaaccgctcagcccatgttaaaatatatgctgagcaagagggataaaggagtgcagaatgattgagcaataaacaatctcgttttgaaaaccgtgataagcgcagaaaagcaaatatggtgcttaacattttaattgctatcgtatctattcttattgtcgtcgttgccgtcagcctcttcatcaacagtccgtcgagcgacgtgagcgaaaaagcggacacgagccagaagcaggaaacacctgcatcaggcaagacgaagcagacatcggatgaagacataaaagacagcaaaaaagataaggcatcagacgatgacaaaaaagataaacaggataaggacacatctgattcatcttcagattctgacagcaaaaaagacgatgattcatcgaaaagtgatgacagcagcaaaaaagactctgattcaagcgatccttttaaaggcgcaaaaataacagagggcggctcatcaagcgatgtcgagaaaacaattgttaacccaaaatggaaagcggtcggcacaaagcagacgggagaacatgcggcgacgtatgactcaagctctgaagactggtccgaaatgcttgacgccatctcttacgccacaggcgtgtcaaaagatcatatgacagtgctgtggctcggaaacaatggaagcccgcaagatgcgaagggtaaagttttagacaaaacgaacggcaaaaagtatcaggtcaccatcacttggaaagacaaaaaaggctggaagccgacaaaagtagaaaccttaaaataaccgcaaaaaagcagctgattattcagctgcttttttctgtcatacgtcagctgaaaaatgcaccgacgcgctgtaaaggattctgccgtcaacggccgtcacctgatgggatacggaacggacgcgaagcataatcgcctggttgttttcaatctgaacgtttattttcttttcaagctcctgcaaagatgccgcttcgaaaaattctactttatctttgattaaatccaattgaaaattcatcagtacagatcctcctgatttttcttctgagtcaatgaaagtataagcctttctgccgtaattgcgcaataatcccaaagtattttagtacccttccattcttttttgtgataggataggaactgttccacgattaatccatactatactcataggaattataaaatatggagagtgaaaaatatgggccgtgaatttattcctttatttgaagattgggcagcgacttatgatgccacagtgcacggggctgacaaacaatatgccgctgtttttaaaggatatgacagcattcttgacagcattgtcgcactttcaggttcaaacgttttagagttcggaccgggaacggggaatttaacggcgaaattagccgctgcgaacaaaaaggtgtttggtgtagaaccgtctccgtcaatgagaaaactggcggctgacaagctttctgacaaagccgtgttcagtgacggagattttctggagtttcccgctccgccttttcaaatagataccatcgtcagctcgtacgcctttcatcatttaaccgatgaagaaaagcgaacggctgtaaagcagtatggcgcaatccttcagaagcatgataaaatagtgtttgccgatacagtctttaaagatcatgaagcttatgatgaagccattaaaaaagcaatccgaaacggctatcatcaattagcggacgatttaaagacggaacattatccgacactcgggacaatgaaaaacatcttttcagaagagggatttgccgctcggtttacgcagcaaaatgactttgtctggataatggaggcgattaaacggtaaatcgaagggattgtgtataaatgaaactggcagtcatcggagcaatggaagaggaagttacgattttaagaagcaaactgaaagacgcaaaacaagagatgatcgctcactgtgagtttacaactggcagctatgaaggcgtcgaagtcatcttgctgaaatcaggtatcgggaaagtcaacgcggcgatcagcacgacgcttctgcttgaccgtttcaaacctgattatgtgattaacacaggctcagcgggcggttttcatcatacattgaatgtaggcgacgtcgtcatctcaacagatgtccgccatcatgacgtggatgtgacggcgtttgactatgaatacggacaggtgccgggtcttccggcagcatacaaagctgatgaaaagctgatcagtattactgaggaagcggtttctgaactgaacggcattcaagtcgccaaaggcacaatcgcaacgggagattcttttatgaatgatccgaagcgggttgaagacgtacgcgccaaatttgcggatttgtacgcggttgagatggaagctgcggctgtcgcacaggtgtgccaccagttcaaaacgccttttgttgtcatcagagctttatctgatattgccggaaaagaatctgacgtttcatttgataaatttttagaacaggctgccgttcattcaactgagcttgtcctgaatgtcatcaaacgaattcactaagcgggggattctcgttctcctccgcttttccaggaggaggacatatattgaacgtgataacagatattacagaactaatcggaaatacaccgctgctccgtctcaagcattttgatataccggagggaacagcggtttatgctaagcttgagatgatgaatccgggcggaagcattaaagacaggctgggcgggatgctcattgaagatgcgcttcgcacgggaaaggtgaaaccgggcggcgttatcattgaggcgactgccggaaacaccgggatcggactcgctctgtgcgccagaaagcatcagcttcgcgccattttttgcgtcccggagcatttcagcagagaaaagcagcaaattatgaaagctctcggagcggacatcgtgcatacgccgagagaagaaggcatgcagggagccatccgaaaagcgcttgaactggagagagagattaataattcttatgccgttctgcaatttaaaaaccgagtaaatccattgacttactacaaaacgatcggacctgaaatatggaacgcgctcggcggggatatccacgcttttgtcgcaggagcgggttccggcggcacctttgccggtacggcagcttatttaaaggagaaaaatcctgccgtcaaaacggtgatcgttgaaccggaaggctcgatcctgaacggaggagagccgcatgcccataaaacggaaggcatcggcatggagtttatcccggattatatggacgagaaccattttgacgccatttacacggtggaagacgatacggcgttttcgcttgtcagagaagcggctgagaaagaaggcctcttaatcggaagctcttcaggggcggctctttatgcagcgcttgaagaagcgaaaaaagcgcccgccggatcaaatatcgtcactattttccctgacggcagcgatcgatatataagcaaaaacatttttcaaggaggccagtaagatgaagaaaaaaacgctgatggtgcacggaggaattacgggagatgaaaaaacaggagcggtttccgtaccgatttatcaagtaagcacgtaccaacagccgaaagcgggcgagcacacgggttatgaatattcaagaacggccaatccgacgcggacggcgcttgaaagcttaattgcggagcttgaaggcggcgcggcaggatatgcgttcggctcaggcatggctgcgattactgccgtcatgatgctgtttgacagcggcgatcatgttattatgacggatgatgtatacggcggcacttaccgggtgatgacaggcgtgctgaaccgcttcggcattgaagcggactttgtcgatacgagcagcaaagaaaaagtccaaaaagccatccgtccgaatacgaaagccatttatatcgaaacaccgacaaacccactattgaaagtgactgacctcaaactgatgtctgacatcgcaaaagaagcgggcgtattgcttatcgtcgataatacgttttacacgccgtatttccaacagccgctcagcttcggcgcggacatcgtgcttcacagcgcgacaaaatatctcggcggccacagcgatgtcgtcggcggcttagtcgtcacggctgataaagaactgggcgaaaagcttcattatgtgcaaaactcaacgggcggcgttttaggaccgcaggattcatggcttttgatgagaggcattaaaacgctgggactcagaatggatgccatcaatcacagcgccggaaaaatcgccgagctgcttgaagcacatgatgccgttcagacgctctactatcccggatcagcgaaacacccgggccatgagctgacaaaagcgcaaagctccggtttcggcggaatgatttcctttgatgtcggcagcagcgaacgcgtcgacgcgtttttagaaaaattgaacctgtttacgatcgcggaaagtttaggagcggttgaaagcttaatctccgtgccgtccagaatgacgcacgcatcgatcccgcgcgaccgccggcttgcgcttggcattaccgacgggctcgtgcggatctcggtcggtattgaggatactgaggatttaacggcggatgtgaaacaggcgcttgattcacttttataaagaatggatagatttacattctctgtcggctgtcagcttgtattataatgttggtagactataaaactggcaggtgaccttatatggagaagaaaagactgaaatcattaatagaagatcttaagcattacgcatttattctgcttgcagtcagcaccttcatttatatcggcgcggttcttcccggacaagggctgactgcgggccagaaaatgctgatgtttgtaacggattgtgtatttttagcgggcgcttatttctgcgttgaccgttcacttatttataaaaagaggctggaagaggccgatgaataaaaaaaagccattgtcttttgacaatggctttttcgtttcttattcagacggggtttcgcgtaattcttttcccattccttttaaaaactgcagcccgaagccgagcgcgcggttaatatcaggatcaccgacggctttcatcagttcaaacatactgactttcctgtcctcttttaaaaatctttgcgcctgatccgtcccggccatggcgctttctaaaagtctgcccataaattcgggatcagcttttgacagcgcgcctcccgcggccatcatcgtattcaggagattggtgacaggttcccgggaaatctgtccgagtgcgattttggcaatctcctcttttgcctggagcatatagccggcggcatcaaaaatgcccaagccattcagctctgccatgatggacatcgttttcgcgacggcttcttcattttctgcgagaagcgtcttcagctcttccagtttttcagctttcagctgttcctctgttttcgtttctttttgaatttcagtaattgggcttgccataatgtttcctcctttccttaatcagttaagtgcacatagcccggacggttccattttcgctgagcttccacaccgttttgcggatgacgttttttgttccgcggattcgttttcggaagcggcggagtatcacaggaaccgagcacttccatgcggacttttgtctgcttataggcaggtgtatgtgtccgtgaatcatacgcaggcccggtcaggaaattaatcgcagaatctttatctgtagagttcatcggcagataaagctcatttgcgcggacgcggtctgtcacaagcgcgttcaatttaaccgccccaaaaggagagacgagccggatcattgtcccgtcgcaaattccgcgttcagccgcgagctccggcgatacttcaacaaatacatccggaactttagactgaatgccttttgacttgtttgtcatgtttccttcgtggaaatgttcaagcatccgtccgttgttaatatgcaggtcatattcttcagggaatacggcaggctccacccaatcgctcagcgcaaaacgggcttttttgtccgggaagttaaagccgtcttcataaagaagcggagtgctttctcccgtaaaacttccccacaagaagctgttccagccgctaagaacgtcgtaacttgcttttccgaacagcggagaaaggctcgccatttctgagaaaatgtcgctaggatgcgtgtaattccaatcagcgcctaaacgattggcgacttcctgaataatccaccagtcgggttttgcatcgccgagtgtcggaagcgcctgatacaatctttgcacacgccgctctgtgtttgtaaatgttccgtctttttcaagagatggaaccgcaggcaggatgacatccgcgtattgcgccgttcttgaaaggaaaatatcctgcacaacaaagaaatcaaggctggataaaatgttatgaacatggttggcgtttgaatcgacgagcgccatatcttcaccgacgagatacatggctttcatgtttccttcttcaatcgcatggagcatttcgatattatcaagacccggcttgccgtcaatttcaacaccgtaagctttttcgaatttagcgcgtgccgcatcatcggtaatatgctgataccccggaagccagcctggaagagttcccatatcgcaagcgccttgaacgttgttatgtccccgcagcggataggctccggcgcccggacggcggtagtttcctgtggcaagcagcaggttggaaatcgccgctgatgtatcagagccgcctgtattttgagtaacgcccatgccccaaagaacacaagtgccgtctgcatcacgaatcatttcggcaatgcggatgatcgtatcctgagaaagtccggtgatgcgctccgcatattccaatgtgtatttttccagcgtttctttataatcatcaaagtagttgacattttcatcaataaacgcttgatcgtgccagccttggtcaatcatatatttcgttactgccatgagccagacctggtcagtcccttgtttcgggctgataaagaggtcggaccgttcagccatttcatttctgcgcagatcggcaacaatcagtttttggccgtgcagtttatgggcgcgtttcacgcgtgtggccagaaccggatgtccttccgccggattggcgccgacgatgagcacgaggcccgcttttgcgatatctttaattgtgccggcgtctccgcccataccgacggtgcggaataagccgtccgttgccggtgactggcagtagcgtgagcagttatccacgttgttggtttcaaatacttgacgtgccaatttttgaatgacgtagttgtcttcattcgtaattttagaagaagaaataaaaccgacagaaccatttccgtgttcgtccttgatcgaaccgagtcttgaagcgacaagatcaagagcttcttcccatgacgattcaacaaatgcgccgtttttccggataagcggttttgtaatccgttcttccgaattcacgaagtcccagccgaatttccctttcacacaagtggaaatcgcgttaaccggagcatcggaaacaggctgaattttaaggatgtcacgtccttttgtccatacttcaaaagagcatccgacgccgcagaacgtgcagactgtttttgtttttttcgtccgtttatcgcgcatagccgcttccacttcagacacggcgaagatgcttgtatagtcgggttcaacatttttcactaaatcaatcatcggttccatgacatcttcttttattcctgtcataaatccggcttggccgagcattgatttttccatcagtgcgttacaaggacagacagtgacacactggccgcagctgacgcaggaagattcattaatggcgacgccttcatcccaaatgacccgcgggcggtcgcgctcccaatcaattgaaagggtctcattcacctgaaggttttgacacacttccacacattggccgcaggcgatgcattggttcggatcatagcggtaaaacgggtgagacatatcaaccgcgcactttgaatcatctttcggcgtatacggatatttctgatgctcaattcccatcatttccgctgtattatgcagtgtgcaattgccgttgttgttatcgcataccgtacagtaaagcaggtgattctcgagcaggcggtccatggcctctgtctgagcctcttttacccttcccgacgtaagcgagatggacatcccgttttctgcagccgtggaacaagagcgctgcaatttcccgtttacttcaacaatacaggtgtcacatgtttgaatcggatccacttccggtacatggcatatttgcggaatctcaattccgttttggtttaaaatatctaaaatcttagacccctctggtgcttcatactccgtgccgtcaattttgacacggatagactgaacgtctgtcacttccaattcccctccatcttttaaactcgaaaaaaagccatgcacatagataccggcctcctgtacggagaacggtataaatacgcatggcggaatagttcactagcaagtcttactaacagaccaatcctatttgtataaaacgatagactcataacacgtttcctattacaaatccatcttcactgcttttattataaggtgatatttattataatacaatacgaaaggaaaactttaaccaggtgaaatgtcacaaaggggaaccgggaatgtctttcataggctaaaatcggaggggacaatatgtctaaaaaaattcatgaatttaacgatattatccggaaattgcgcaaagaattatttggaaaggggcctgaacgaattcacaccgtttttgtggataacatggcggtatctacactttacggcaatctaagcgcaagtgagcagtttatcgcacgcacgcctgaaggaagagaaatggttcatgcggcgcgtaccagcttaattcaggaactgtattcaaaacaaacgcctgacggaatggaagagctcatcggagcaaagctggtgcatctgttttcagatataaaaatagaggaaaatattgctgtatcggtgtttgtctttgaccgctcaattgaagagcataaagaagaaatcaaaagctgacaatattcaattgacacgaaattgtcacatttgatatgatatgaactgccagcagtggcctaaggacgattttttatggaatgtgtgcatgatctgtacatattctataccgcatattttcattctgcttgatattgttgtatgggtatgcatacaagttaggcagcattcaaaccccgttttttcagacgggttagttgaatgctgccttttttgttaggcgtctttggaaactgcgggctgaaatgataaatggaggggttattatggcttttcgtaaaccggacgaaatagcggagcttgcggtcgaatcaggggtaaaaaaggtgcattcaccgctttcagcactgattgtattaggatttttgggaggagcgtttatcgcactcggttatttgcttgatatccgtgtcatcggcgaccttccgaaagaatggggaagcctgtcgagtttaatcggggcgtccgtgtttcccatcggattggtgctcgtcgttcttgccggcgcggagctgattacgggaaatatgatgtcggtatccatggcgctgttttccagaagaatatccgccggtgcattagtgaaaaattgggtgatcgtgacgttgatgaatcttgtcggcgcactgtttgtcgcttactttttcggacatgttgtcggattaaccgaaacaggaccttacttggaaaaaacgattgcggtcgcacaaggcaaattggatatgccgtttggaaaagtcattgtttcggcgatcggctgtaactggcttgtctgtttggctgtctggctttctttcggcgcagaagacggagccggaaaaatcgcgggtatatggtttccgattatggcgtttgtcgcaattggttttcagcacgttgtagccaatatgtttatcatcccggctgcgatatttgcaggttctttttcgtggggtgatctgattggcaatctcattccggcctttatcgggaatgtcatcggcggggcagtgtttgtcggccttatttattttattgcatattcaaaaaaagatcagaaaaagcaagggatgaaaagagtttcctgaggtaagaaagatgccggaaaacacggacaattgaagcggaatgccagcacattttccgtccaaatcttgaaaaaaatgtttacaaaatggaagctgatggatatacttacaaagtaagaaaaaagcaaagggaggttgaatcacatgacgacgttaaacggcaatcaaaatctacaattgaaccgattcagcctgtggaagagttcgtgtccttccttaacctctgcccgtcaagcacgttaatttcggagtatcaggacattcgcagctccccgcagggaaagaagcaccgtcttcttttgtctgcggatttagtctgcccgcagcgcatatgaactttgctgcgggttattttcgcttgtgcggatattgaaagggggtgagcgataatgaccattaatcttttctttttaacactgaccatttcaaagcgttttaaaagtgcggaagagtatgaacgagaacagcaggtcgaagagttttataatgaagcgaaagaacgccagctgaaacacttttatatgaactaacggacacgaagggccaaaacggaggagaaggaggagatcatcatgttcagaattgaactgctgaatcattacacaatggagaaggaccaggtttagcgaggatgttgctgtcacgtcgcagacggcctgcataccatggtaaagaaagaaaaactggtaagcgggtgatagcatgcaaggcggtcagaacagaattccatccatcgggcacgggtatgcgtcaatgccccattcatttaaacacggctacggcaacccgtatcgccggcagagaatggcggcgctttcccggcacacaagatatatagcaccgtattattggtactagagcaggcggaaaacctacgttttccgtctttttttatgaaaacaaatataaatttcaaataaatcgaaacgttcatgaagagaagtgcgtctagttagtacctcatactaatacgaggtaatattatttctgaataataaatcacaggaatggaaaagcgggtgttatacaatgttgcaacatacatcttcagcattaaaacgaatgcgcgcgaaatactttgctgcatcagaaccggcagagtcagtcattcagcaaattttgatggacatacaggaatacgaccgcattttggaaatcgggaccggaaacggctcaatgtttaaacaaatcatcggacagcttgaaaagggcagtcttaaaagcatagaaacatcgaaacgtaaaatacggaaaacacagcgcgcaaaccgttcggttataaaagccgggctcggaaacattcagcaggggagaccggaaagcataccgttccgcgaccgcagttttcataaagtcttctcgttacatactgctgaaacagtcagcgattaccggacggcatgtaaagaagtgtaccgcgttcttcaaattgacgggtgtttctatatggttttgaaaccttcgcggatgagtgaaaaggatgtgattgaggtgctctatgatcagcatttcagagacatttcagttgtcagcagagattcattccattttattactgccattaaatagaatatttcttgggaaataaaaagagctgcttaagtcactgcagctctttttgtggaattgggcatatttccttatttttggttatttcacatatattttatattaaaaaaagtttttttcttatacaatggtaatcagatgaccgtacattttaaatattttgaacaaacggaatgaatattcattccgtatttagaaagggggatgaaatgacagcttcaaataaggttgaactcattatgaaagcgtcgcttactttgtttacagatagaggatttgacgccacgacgattccgatgattgccgctcaggccgatgttggaaccggcacaatttaccgttactttgacagtaaagagacacttgtgaacgtactgtatcaggaaagtgcgcagcgttttatgaaaaaagtcaaaacggactttcaggggatatctgtaagagaagggtttcatcacctgttttattgtctgattgattttacgaaggaaagtgagtatgcattgttttttcttgaaacgaataaggacgcctactttctgaatgaaacgagccgtaagcttcttgatgaaataacacagatgcttgacgtcttttttcagcgcggcaagtctgaaggtgtgctccgcaatctgccgtccaatgtgctgatggcgctgctgctcggggcatatctcaaactctatcagcttatccggacgggaagcgtcgaaataacaaaaccgtttttgaaagaattggaacaatgttcttgggatgccatcagaactcattaattattcgccgaaggaaggaagatcgatatgaaacagctaagcgctataccgcagccgaaaacatacgggcctctgaaaaatctccctcacttggaaaaagaaaaactgtcacaatcgctttggaaaattgccgaagaatacggcccgatctttcgttttgaatttccgagctctgtcggggtcttcgtatcaggccgcgagctcgcggcagaagtctgtgatgaaaagcgatttgacaaaaatctcagcaaagccttgctgaaagtccgtgagtttggcggtgacggactatttacgagctggactcacgaaaagaattggcagaaagcgcatcggattttattgccgagcttcagccagaaggcgatgaaaggctatcattcaatgatgctggatattgccatgcagctcgtgcagaagtggagcagattaaatccgaatgaagaaattgacgttgccgaagatatgacgcgcctgacgctggatacaatcggcctgtgcggatttcattaccgctttaacagcttttaccgcgacacacagcatccttttatcacaagtatgcttcgtgcgctgcaggaggcaatgcgccaatcacagagacacagcctgcaggacaagctgatgatcaaaacgagacatcagttccagcaggatattgaagagatgaattcgcttgtagaccggatcatcgctgagcggagggaaaatccggatgagaatctgtctgaccttttagcattgatgcttgaagcgaaagaccctgtaacgggggaaaggctggatgatgaaaatatccgttatcaaatcattacttttttgatcgcggggcatgaaaccacaagcgggctgctttcttttgcgatatactgcctgctgaaaaataaagataaattgaaaaaagccgttcaggaagccgagcgggtgctgacgggagagacccctgaatataagcagattcagcagctgacatatatccgcatggtgctaaacgagactttgcggctgtatccgactgccccggcattttctctgtacgcgaaagaagatacggttctcggcgggaaatatccgattgcgaagggacagccggtgacgattctgactccgcagctgcaccgggataaaagcgcgtggggagaagatgccgagttattccgcccggaaaggttcagcgatcccgcggcaattccggctgacgcgtataagccgtttggaaacggacagcgcgcatgcatcgggatgcagtttgccctgcaggaagcgacaatggtgctcggccttgtcctgaaacattttgaactgattgatcatactgattatgagcttacgattaaagaagctctaaccattaagcccggtgattttaaaatccgtgtgaaaaacaaggacgtgtccaatcagcagtccgcacaaaaccataaagctgcaggcagcggtcacaaagaagaaacgaaagaaatcccgtcccacggaacgccgcttctcattctttacggatcaaatttaggaactgcggaaggaatcgcggaagagctggctgatatcggaagaagcaaaggattttcaactgaaaccggcccgctcgatgattatgccgggaaactgcctgtaaaaggcgcggtcgttattgttacggcttcttataacggggcgccgcctgataatgcggcgggttttgtgaaatggatggaaacccttgaagatcaggaattaaagggtgtttcttacgccgtcttcggctgcggagaccgcaactgggccgccacttaccaaaggatcccccgcctgatagacaaagtgcttgaagaaaaaggggcaaaacggctgacctctatcggggagggcgacaatgccgatgattttgagtacagtcaggaagcctgggaagactcattctggaaggacatcatgaaggcttttcatatagaggccgctccaaaacagacaaacaaatcacagttatcaatcgaatacgtaagtgaagcagccgagacgccgattgccaaaacgtacaaagcatttgaggcggaggtcatcacgaacaaagagcttcataccgaaagcagcaagcgctcagtccggcatattgagctgcgtctccccgaaacagaaacgtatcaggaaggagatcatctcggggtgcttccgcaaaacagcggggaactgatcagccgtgtcattcgccgattcggtcttgatccgaaccagcactttaagatcaagggccggcagctgcctcatctgccgatggaccggccggttaatgcgccggagcttttggcatcctatgtagagctgcaggagccggcaacgagagcccagcttcgcgaacttgccgcacataccgtgtgcccgccgcaccaaaaagaattggagcatctttattctgatgatgcggcatataaagaaaacgtgctgaaaaaacgaatgaccatgctggacctgctggaagattatcctgcatgtgaactgccgtttgagcgctttttagaacttctgccgtccttaaaggcgcgctattattcaatctcaagctcaccgaaggcaaccagcggggagctcagtatcacggtcggcgttgtgacggctccggcatggagcggccgtgggcaataccggggcgtggcttcgaactatttagccggattacaaaaaggcgattctgctgtctgtttcatccgctcgccgcagtcgggtttcgcattgcctgaaaatccgaaaacgcctctcattatggtcggagcaggcacaggaattgcgccgttcaggggatttatccaggcgcgggctgccgaaaaaatgtccggtaacagcctgggcgaagctcatttatacttcggctgccggcatcctgaacaagacgatctgtacaaagatgaattcgaccatgcggagaaaaacggccttgtcaccgtgcatcgggcgtattccaggttagatcaggactgtaaagtatatgtacaggatgttctgcttcgcgaggctgcacaaattattgcccttcttgaccaaggcggccatctctatatatgcggtgacggaagcaaaatggctccggctgtcgaaaatgtactgcttcaggcgtatgaaaaggtgcataacactgattcaaaagtttccttgaattggcttgaacagctgcaggcggaaggaagatatgcgaaagatgtttgggcaggtatgtaacagaagagtgagacaactgaagaatgttttttaattgaagaaagccggcacgatatttgaaatctactgaatcaaaaggaatagttatagggagtatcgtgccggccttatctttagtatcggacaaaaggcacaaatctttaatgtttttattgattcacatgcaggcggctatgtcccttttttctgaattccgccagaaataaaatcggataagacagcaatagcaaaaccgaaataaatgaaatgataccgatccaatgaaaatgcgtccaaaagaaaccgccgcaagacccggccacgcttgaaccgatatagtatgcaagcagatataatgaagaggcttgcgcgcgatgatcaccggctgcgcggccgacccaggcgcttgcgatcgaatgcgcgccgaaaaagccgaaggtaaagacggcaatccccgcgattttaagcgcaagctggggcaaaagtgtcaccgctgcgccggcaagcataacaaaaatcgcaatcttaatcattttcgcgcttccgaaaagatctgcttttttccccatatagacagagctgaacgttcccgcgagatagacaataaaaataaaaccgatcacagtctgcgacaaatgataaggagccgccattaaatgaaagccgatataattatataatgtcacaaaactccccattaatataaatcccagagatattaacaaaagcagccgtttgcggtgcaggaccgctccgtattccttacatgccgcttttacgcccgcatgccgctcagatgaatggcgcggagccggaagaaaacgccaaaacaaatagcttaatacaatagaaagaatgccgatgatggcaagcgccggccgccagccgaatacatcggtcagaagccccgttaacagcctgccgctcattcccccgatgcttgtgccgctgatatacaagcccatcattttcccgaggcccttcggatcaaactcctcgcctacatatgtcatagcgacagccggaacgcctgccaggaaaataccgagcagcgccctcatcgccaaaagcgcgggaaaagccggactgaacgctgttaatagacctaaaacagaagtagctgttaacgacagcaccattaatttttttctgccgaatccgtcagacaacgaagcggcggccaataatgaaaatgccaaaacggctgttgagatggataaagttaagctggcagccgcagcggaaatatgaaactcttccgaaaacaaaggcagaagcggctgtgtcgtgtaaagggtggcgaaggtcacaaagccgctgataaacagagccaagctggcctttctgtaagcctttgtatgaggctgaataaacgtcatgaatgtccctcttttctcactgttggttatatatgtatcgtacgcttttcatttcaatgtgtctaatttataataactatagaattaatgcgtgtaggttatgaagaaaggggagaaggagaaaatggagcttcatcaaattgacaacttcattgcggcggcagctcatcagcatttcacaaatgcggcaaaagaaagaatgatttctcagccggcattaagccgatcgattatcaggctcgaagaagaattaggcgcgccgttattttacagagagacaaaagccgtccggctgacaaggcacggagagcagttcttaataaaagcaaaacaagcgagacgagctttaaatgaaggcgttgaacaagtgaaaaagaatatgagcctggagcacggcgaaatatctgtatcttttcttcatacgctcgggctgcgcttaatgcctcagctgattgccgaatttaaaaagctatacccaaacgtgaccttccggctttatcaaggtgcaaatgaaacgcttcgcaaaatggtggaaacgggagatgcggatatctgtctcagctccccgccgcttcccagcgagcttttacaatggacagtgctggagaaagagcctctttatgcggtgctacctgagaaccacccgcttgcaggaaataaaagcattcaaatgaaagagatgcaggacgaggattttgtgggttttaaaccgggatacgggctgaggtatatgtttgatctgatgtgccgggatttgaatatacacccgcatctcgcatttgaaggagaggaagtgtcaaccatattagggctgaccgccgcgggtctgggggctgcagtgctgccgaaaaccgcggagcattcatactttccggtcgtttttctaccggttgcagattaccaatgcgaacgcaccatagcgctagcccagctgaaaaaccatgctctttctcccgctgctgagtgttttaaacagtttgcacttgagtattacaaagcacgcaactgagcggtcattttattaaaatcgaagttgaaaataaagcagaaagaaatacagaaaacggaggaaaaccatggcgaaaaaaacagtgaaaacaaatgctgtccgtataattgagcagcaaaacattccctatgagctattaggttacaaaacagaagggggacagcccgcagacggtctttccgtttcacaaaaaatcggatacgctgccgaatatgtttataaaaccttagtggcatctgcaggtactgatcgttattacgtctttgtcgttcccgttgcaaaagaactgaatctgaaaaaagctgcgaaggcggcaggtgagaagaaaatagaaatgattgccatgaaggaccttttgggagtaaccggctatatgcgcggcggctgctctccgatcggcatgaaaaaaaggtttccgacttttattgatagatccgctgaaacactggagtttatgattgtcagtgcggggaaaatcggaatgcagctgaaagcagcgcctcaagatttagccgaagcaagcggggcggtatttacagacattgtataaatgtccgatgaatctaatagaacacgtgtcaagggagaatgataatgaaaaaaagatatgaaaacttgaatggcgtgaagaatgaacatggattcagggacatgtggaaatggatgaaagaacgaagagaaaaaagtaaagacttaagcgagaacattccgaaagcggtcacaagggatgtccgtgatgttgccgtcaatcggacggaaaccgccataacttggatcggccattcttcatttctgatccaaatacaggggcttaacataatgaccgaccctgtatgggcgcggcggatgggttttcaaaaacggctgacagagccgggatatgaattgagcgaactgcctgacattgatgccgtgctcatttcacacgggcattatgatcatcttgattttccgagtataaaaaaactgagaggaaacccggatttttacgtgcctgcgggattgaaaaagctgttcaacaaaaaaggccgcaaaaacgttcatgaaatgaattggtgggatcgttttgagatgcggggggtgaatatatcatttgttccggcccagcactggacacggagaacgctttgggataccgatacctctcattggggaggctgggtcatagaaagcaaaaacggcgagtccatctattttgcaggagatacaggctattttgaaggctttaaagaaatcggagagaggtttcgtattaaggcggctctgatgccgatcggagcatacgaaccggaatggtttatgcaagtgtcacatatcaatccggaagacgccgtaaaagcgtttttggagctgaaggctgacagcttcattcccatgcattacggggcattccggcttgctgatgatacaggccgggaagcattaagcagactgcacggcgagtgggatcggcttgcattatctcctgaaaacctgaaagcattagcgcttggcgaaacattttggctgtaacagcaggttttcgctgccgacaccaatcgtttaaaaacggttggtgttttgacgtcaatcaaaggtgaattgtctctgtataaaacatgatttttccggaacctgcggtaaaaaacaaaactttttactcttttgtttcactataaaatgaaaacggtttcgtatgcgcagtatatttaacctatcacaattgctccagcagaaacggacaggaaggatagaaaaacagatgaaatacatgaattcaaggcagaaaaagattttgtatctgttgttatctgaacctgatgactacttagttgtgcaagatttcgcagacagggtccgctgttctgaaaaaacgatcaggaatgatttgaaaacgattgaagatttcctgaatgaacatgctcaagctcagctgatccgcaaaccgggattaggcgtctatttacatatatctgaacaggaaaggtcacggttaagccggcaaatttataatgagcactttacgtgcgggcacaagaccgatgaagaaagaatacttcacatcgcttatgatttattaatgaattcaaagcccgtttccgcaaaagaaattgccgcacagcattttgtaaacagagcttccattaaaaaggatgtaagtgcggttgaggagtggctgaagcgatttgatctcatactggtttctaaacagcggcttggcttaaagattgaaggggacgaaaaaaacaaaagaaaagcattggcgcgaatttcagatttgattgataatgcggaatttacaagccaatttataaaaagtaagtttttaagttatgaagcggactttgtgagaaaagaaatcaagttattacaaaaaaaacattctatctattttacggatgaaacatttgaaagtttgctgctgcatacattgctgactatccgccgtatcaaaatgaaacagccggtcgccatttctgcaagacagctggacgcggtaaaaaagaagaaagaatatgaatggacactggcttgtttaaaacggcttgagccggtatttgccatccggtttcctgaggaagaagccgtctatttaactttacatataataggcgggaaagtccgctatccatcgcagcaagaaaagaagcttgatcttgaagattctgagctttccaaagtcgtcaggcatttgatcaatcgtgtttcagaactgcaaatgctggattttcataaagaccgggaactgatcaacggattgaacattcatctcgatccggtgttgaagcggctgagctatgatctctctgtttcaaaccccatgcttcacgacatcaaaaaaatgtacccttatttgtttcatcttatcattgacgttttagaagacatcaatcaaacatttgatctttatattcctgaagaagaggcggcctatttgacgctgcattttcaggcagcgatcgaacggctgcgccgaagcagtcataaccctaaagggacgatcatcgtctgccatatgggcattggcatgtcacaattgctgcggactaaaattgaacgcaaatttcatcacattacggtaaaagactgtatcgcaaaagcggagctgacagagtatatcaaaaagcataaagatatagatttcgtcatttctacgatagggcttggaaatgtaacgatccctcatattgtcgtatcaccgcttttggagtctgctgatgaaaagaagctcagcgcatttatgcaacagcttgatacatcacatcgccgggagcaaaaaacgtttaaaatgctgaacgacacgactccgtttctcgtttttttacagcaagagacagagcaccgttatcaggtcattgaaaagctggcgcaggctttgtatgaaaaaggctatgtagaaaaagagtatggcattcatgcagtaatgagagaaaaaatgtcggcgacaaatattggggcgggtattgccatccctcacgcgaactctaaatatatcaaacaatcagccattgcaatcgccaccttaaaagagccgattgaatgggggacagaaaaggtgtcgctcgtttttatgcttgctgtcaaacacgaagatcaaaacaaggtaaagcaattattcagtgagctttcctatcttagcgagcagccggcatttattcaaaaactgacggaagaaaaaaatgtgatgacgtttttatcgtatttaaactattaaaagcagggaatggctccctgctttttttctgtttatagggaaaaatgccgttatttccggaacttatggtaaaaaaacgtgcttatcacaggctgatttcagtataaagttgagacaagatcttgaaattcagactgcaaaggaggatttatatgaaactgttagcgattacttcatgtccgaacggcattgcccatacgtatatggctgctgaaaatttacaaaaagcagccggcagattaggcgttgagatcaaagtggaaacccagggcggaatcggggtggaaaataggctgaccgaagaggaaatccaggaagcagacgcaatcattatcgcggcggaccgttcggtgaacaaagaccgattcgcgggaaaaaagctgctggctgtcggggttcaggaaggcatccgcaaaccggaagaattaattcaaaaagcgcttagcggtgaagtgccggtctatcaatctgcttcaaaagctgaatccgcaagtcagcagggcaaaaaacaaaacccgatttaccgtcatttaatgaacggcgtttcttttatggttcctttcattgtcgtcggcggattattgatagcggttgcattgacgcttggaggagaaaaaacaccaaagggcttagtcattccggacgagtctttttggaaaacgattgaacagatcggcagtgcttctttttcattcatgatcccgattttagccgggtacatcgcgttcagcatcgctgataagccgggtcttgtccccggaatgatcggcggatatattgcggcatccggcagcttttacgacagtgcaagcggcgcaggatttcttggaggaatcattgcgggatttttggcgggatatgcggcgcttggaatcaaaaaatgtaaagttcctaaagcaatacagccgattatgccgatcattattattccggtgtttgcctcactgatcgtcggtttggcgtttgtctttctgatcggcgcccccgtcgctcatattttcgcatcattaacggtttggcttgcgggaatgaaaggttcgagctcaattcttctggcattgattttaggagcgatgatctcctttgatatgggaggacccgtaaacaaggtggcctttcttttcggatcggcaatgatcggagaaggaaattatgaaatcatgggcccgattgccgtttccatttgtataccgccgatagggcttgggattgcaacgtttttagggaaaagaaaattcgccgccgcagaaagagaaatgggaaaagcatcatttacgatgggccttttcggtatcacggaaggagccattccatttgcggcccaagacccccttcgtgtgatcccgagtattatggcgggttctatgatcggctcggtgatagcgatgatcggccatgtgggggacagagtggcacacggcggccccatcgttgctgtacttggagcagtagatcatgtactgatgttttttatcgctgtaacagcaggctctcttgtcaccgctctgttggttaatgtactgaagaaagatatggcgaaatcccccgcgcccggcgaggtgctgccgtctgccgcaccaaatgaagctgcagcggcaaaagaaacaaaggaaccatctcaggctgacagccgaaaagccgggatgaccgaaatcaaaaaactgactgacattatcagtacggacttgattgaaccgcatttatccggcgaaacgagggatgacattatcgatgaaatgatcgagaaaatgtcccgtaaaggtatgctgctgtctgacagcggatttaagcaggccattttgagccgggaacagcagggaaccacggcgataggtatgaatatcgccattccgcacggaaagtctgaagccgtcaaaacgccgggtgtcgcattcggaataagacgttcgggtgttgactggaacagccttgatggttctgatgcaaaactgatttttatgattgccgtaccgaaggaaagcggcggaaatcagcatctgaaaatattgcagatgttatcccgaaaactgatggatgacagctatcgggaaaggctgctctccgttcagacaaaagaagaggcgtatgagcttctggaagaaatcgaataaagcgggggatgatcatgtctactgaaccgatatttttcaatccggttttcaaagaaagaatttggggaggcgccgccctgcgtgattttcactataatattccgtccgagcggacaggggagtgctgggccttcgccgctcatcaaaatggacagagcacagttcgaaacggcatgtataaaggatgtacgctcggtgaattgtgggagcatcacagagatttattcggaaaccttgaaggagaccgttttcctcttcttacaaaaattttggacgcagaccaagacctgtccgttcaggtgcatccgaatgatgactttgccaaaatgcatgaaaacggggaacttggaaaaaccgaatgctggtatatcattgattgtgaaaaagatgcggagatcattttcggccacaacgcaacaacaaaagaagaactgatatccatgattgagcgcggagaatgggacgggcttttgaacagagttaaggtaaagccgggagatttcttctttgtcccaagcggcaccgttcacgcgattggaaagagcacacttattttagagacgcagcaaaattcagatacgacttacagattgtatgattacggaagaaaagatgcggacggcaggatgcgcgagctccatttggaaaaaagtatagaagtgatagacgttccatctgtccgtgaacggccgaccgttcaatataaacaaacagatgatctgctggcagctgttttaatagaatgtccttatttttcagtcgaaaagtgggatgtaaaaggtgaagcaaatctattccaggatcatcccttccttcttgtcagcgtgatcgaaggagacggaataatgattgcaggcgggcatgaatatccctttagaaaaggagatcatattctcctgccttccggtttgggagaatataaactggcaggccatgcaaattgtattgtgtctcatctgtgatcttcaaaacccttctctagcatcagagaagggttttacaaaaagggcgaaatctccagtgtatcagtgttttcgttcctgaatttattctctcaatttgtatatctcccgagccattgattcaagtatgtacatagcggggatttgggtggtgatattcgcattttcaacccattcttccgtcacgtaatatgaaatattcacatcggacattttggcaatggttgaatgtttatgatttgtaatactgatgacccggctgccttcttgtttcagctgattcagatgagtcaccgtagaatctccttcacctgaaaccgataatgcgatcgtgatgctgttatgacggaaatgggaatgggccggaaagtaaggatctttaatatacattgaaagtttccctaagcacgaaaaatatctggccccgtattcggcgagaattcctgaacttcccactccgataaaaacgacgctttctgcatcggccgcaagggctgctgcttccttcagcttttcttccatccctccgcttactgttctttcaaaaaactcggcaacggaatgatggggactctttaaaatcgtttttttatttgcctccgtatacattttcagcttcaccttaaactccgaaaacccttcacagtttatttttttgcagaaacgtaaaatagaagccgtagatacatgggtttcatttgccaattcacggattcgcatatagacgactttctcgctgttttgggagatgtagttgtataaagaagtttcaagctcgttaaatgaagcaatcatttcgtgtgtgaacatgcagggggattctcctttttatgagaatggtgaatgtacatctaatcgtaacatatcatttttaaaagaaacatagtgttatatttatgtgacaaatcactttttgtgtcattcaaaacaagacgtcagccaatgatttacggcgcaaaacaactgcggatataattcgttcatacgctttatgcatgatctctttaagggtctctgacaaaagcggccgaaaaaaggaggacaatatgagtatcaaactgatagcggttgatatggacggaacgtttttgaatgatgaaatggcatataacaaagagcgttttatgaatcagtatcgtgaattaaaatcgcggggaattaaatttgccgtagcaagcggaaaccaatatgcgcagcttacatccttctttccggaaatcaaaagtgaaatcgctttcgttgctgagaatggcgctttcgtcgtgaatgccggagaagaattattcgcgggtaacatgtctgaagacactacaaaagcagtgatccgtgctttagaacagtatgaggtgaataacgtcattgtctgcggaaaaaaaagcgcgtatattcatgaaaatgccggtgaagatgaatatctgcatgccagtaagtattattatgtgttaaaaagggtgccgcattttgaaaacatcgatgatgacattttgaaattttccatcagctttcccgctgaacattgttccgcactactgagccatttgaaaaacgccatcgggtctttcgtcacgcctgtatcaagcgggcacggtgacatagatctgatcataccggggcttcataaagcgagcgggattaagcttctccagaaacaatgggggatgggtgatgaagagtgtgcggccttcggagacagcggcaatgatctggagatggtgtccgccgtgaaatacggggtcgccatggataatgcgcaggaaagcattaaacaggctgccgcgcatatcacgcaatcaaacaatgaagaaggggtcttaaatgcgattgattccattctaaaatgtgaaaaaccctttgtctgaaaaagacgttttaactgcggaggtgctgaacgatgattaaattagtgattacggatttagacggtacatttttaaataatcaaggcgattttgacagaacgttatttgaaaagacaaaacgagtaatggaggaacagcatgtcgctttcgccatctgcaccgggaagcagtgtgaaagagtggaagctttattcggagaagatgcgaaagatttttggattttaggagacagtgccacacgtataaaaaagaacggcaagttcgtatatgaatctttgatcagcaatgaagcgggactgtcaattataggcgctttagaaaaaatcagctgcgggcatagcattatcgcatgcacaaaaaatggtgcgatcgtaaaagaaaatctgtctgaaagtgagatgaaatatgtaaatgcctcttatgcacatgtaacgaaaataactgattttactgagataaaagatgattttatcaagattacggttcatgatcccgacgccaactgtccggaaacgagagaaaagctgcatgaattttttcaccaattatatatcgtagcatcagaggatacctggatggacatagcaaatatcggaatacataaaggaacaacagtacaagaactgcagcgattattaggggtttcggctgatgaaacaatggcgttcggagacggccgcaatgacaaagaattgatggaagcggcatcctacagctttgcggttaagaatgccattgacgaaataaaagatgcggcgcactttgtcatcaaatcaaatgaggaaagcagcgttatgcacacgattatgagaatattagcgctgcaaaaacaatgagctaaaatcaatgcggcaggacttactagggatagaaaaagcgggctatcctcagactttaattcactcctgattttcctaaagtatgttaaaaatgaataaatatctatatttgactcgatggtattggtataatatgtataaaatgaatgaagcggtttaatatcaagatgaaaaaaatcacttcatatcagacaaaaagcaggaactgcctcgttttgaaattgggaggtgtttgtattagcccgctgttgagccccgcgtatatcattcttatttttcttccggcagcttcttttctgttagggattttaggatatttcatctttaaaaaagtatggatgatggttgttattgtattctttttgtccttgatattcatgtttattgtaataggtgccgaaccgacatttttcatttgggtggctatgatgacggggagctgttttgtctccggttcaatcactaagacgatatggactttcgcaaagagaaaatattagacagaagaatcctgtttgaacagctatcctttttttgtcgattgaagaaaaagaagtatagagttatccgttatgttcttatattttgtctgttgttgtcagatcgggctttctgttgaaaatgtctgtctatcgttttgttcttttttaactaaacggagcactataattgaactgtagatacatagaaaaacaaaaaaggataaggaggatttttatgtttcaaaccttagaccattttttgaaatcttgggaattcgaagccgatgcgacacaaaaactgctgaatcatctgactgatgaatcacttaaacaagaaatcacttcacaacattggactttgggccgtattgcatggcatactgtcgctgccattcacatcattacctcaaacacagatttaacgtttcacgctccggccgaagattatcatgttcctgcatcggcgcggtttattgctgagagttatcatcaagccagtaatgcatttgtacaggcgttaaaaacgcaatggactgacgatacacttcaagaatgtgtcaactttattggtcagcaattgccaaatggttcacttttgatgtttttaattcaacatcaaaaccatcatcgaggacaaatgactgtccttatgagacaagcaggtttacctgttccgggtatttacggtccggcaaaagaggaatggactaaattcggtttggaagctccgaaataggatattgttgtaagggctcgaatgaatagatgataccaatcgatgttagtatcttttttgttttttagagttattaaaccggtatccatgacatgcagacgaatcaacagttcaaaagatgtaaattaaggtcaataaatacagaaaggtgattatgatgataactaaaatgacgcgattcaatatgaaagacttcaataaaccaaacgaatctttcgttgtttcagggagaatcatcccttcatttgaaaacaatgtttggacatatacagaggagaaatttgctgaaccttatgtcaaaaaatatgatgatgaagacattgatgtcagttatattgaagaagaggataaagttgtctttttttattacgcagagaacgactgtgtcggccggagtaagcttcgttctaattggaatggatacgcactgattgaagacattgccgttgcagaagattatagaaaaaatggtgtcgggacggctttattgcataaagcggttgagtgggcaaaggagaatcatttatgcggtcttatgcttgaaacacaagatattaatgtttcagcttgtcatttttatgccaaaaataactttgtcataggagcggtcgatacaatgctatattccaatttttcaacagcaaatgaaattgcggttttttggtactgtaaattttagatgtttcgtcatttagcgggtgtgtgtcgcaaagtattcaaaacatcggcttgaggatttataataaggtatatcaatcaatgcagggggagttatggatgaagtgcaaaatcctttgttgaccctgcactgtggaaaaatgtcttgtttatgatgggcgtcctttgctgaggcctgatactcggcactgcagcaggatgtgtgtctatggttccttatatgatgaaagatgttcacatttaagtactgcggcaattggaagcgggattatgttttcccggaacgatgagcgtcatcatcttcggttacattggaggatggcttgttgatcggaaaggttctttatatgtgctgaccattgggattgcattgatgttttccagctttttaatcgctgccttttttatagatgcgacaccatggctcatgtccgttatcatcgtttttgtttttggggggctctccttcacaaaaacggttatatctacaatggtatctggcagtttgaaacaaaaggaagccggcgccggaatgagtctgcttaattttaccagctttctatcagagggaacgggtatttcgattgcaggcggtttattatcgatccgcttgctggatcaaaggctgctgcctgttaacgctgatcattccgcttatttgtacggtaatatgctcattctttttgcaggaatcatcgttatgagctggttggtaaccgtgaatgtctataaacgttcgcaaagaaatgactaaaaagggaaaaggatcaaacttgataaaagttttgattctttttttgaggagcttccttattccgaaaccttttgtcgatcaatgaaaggggagttaaagtgaattacatttataagaaaaaggaaaagaaaaatggaaattgtatcatttcaatcagagataaatgggagaatgcacttattgagtttgaacaaaaaaataatcaaattgagatcatgatcaattatcgtaacgagaaaacaaccaagttttcactgccaatcgagacttttgagaaagtgtatgaggatattaaaataggccggagagaaagttaatcattctgtttgaaaatgaccatgaagttcgtaagcagtaaagttttaacacgcatctgtattcccttggcaaagagtaaaggtttttgggtagttgtgttaaaattgtaagaaccttgtgcgacggacagggagttacgttgcttcataaggagggggaactatgaaaaaaaatattcacatactgggagcctccggagtcggaacttcaacattgggtgttgcattatcaaagcatttgcctcatacacatcttgatactgatgattactattggacagacaaattcactaagaaaagagaaattcctgaaagaagaaagttgcttgaaaaagacttgacaataaatgagaaatggattctttctggcgcagtgtgcggctggggcgatgatctaaaaagttactttgaccttgtcatcttcttatggattccgcaagatatacggcttgagagattaaggcatagggaatttcagcgttatggaaacgaagtgttagccggcggcagtaaatatgaacaatcaaaaacatttttagagtgggcttctttatatgataatgccggaatggaagttagaagcaaagctttacacgaacattggatggcggatttatcttgtccattgctaaaaattgaaggagattactcagtaaatgaaagagttgatcgtgtcttggattatctgaattctaattaaactaacggatggagataactgcaaaatccaaaattcaaagacagttccggccattttaacggagctgtttttttataccgctttcagtttctctgttgtgaagtgatttattttcggcagcatcctacaatagagaagtgatttgttcttcgttaagttctccgttggagtatctctctaaaattcttataaatcgttcatcacctaattaattatttctttgtttatttttattctccatctcattttcacaccgaattaaagccctctcataacgagaagggctttccgccttttaatactttctccttaaaaagaaggggaaggctctatccgtttatccctcttatcgtttattaatcaactctgtaaacatggggaattattggttaacttggaattttttcgatccaaacaaatatctttaaaaaatttaccggcaactttctggggcatatcgcagtgttcgattgtttagtccctttttttcataatctttacaaatctgaaaaagtcatcatcatccggcaggggcttgtcatcttcgcgtccattgcaatgcatatgcggatcagagtgatgttcattgtagaactctacgatatggaatccgcacttattcacatagaagttgatatttcgcttttcaaaataaggtgtcacggtttcccaaagcacagtatccggatactgtgcttctatggctttccaagcagaaagaccaatcccctggctgtgatgttctggagatacatagaataaatctagcgaattatgatgtgtttcgctgttgatacgtactactgcaccacctaccttctcaccatcccgaagaatatgatatacgactgctccgggagcgtcgaaagactcctgaacatcattgtccgatggaatcggtccatcttcgcaatcaccgaacgtttcaatcacggcgatcgcaaaggcctcttgtaattttttttggaattctggcagatcagattcctttgctggttccagaataacttttggttccttttttgttttcatgattgctcactccttcagttgctgaaataacgagttcagtcgttcagtgtaattccagctgctctgccgctttttcttccgcggtaaatttggcgttaaaatacttcaaaagctttctcctgtctttttgtattttttctttgtttcattggaaaacaagctgcatgtaacccttatttactatcgttcattaccgtattaagtgtcgtatgcgggatttgtcatcattctcgaatttttcctgcgaaaagttacaaaaatagtcgaatgggccgcctttgactatgaacatgcgtaaaagattcaatttactttcgatcatgagcaatgcacattgagtaaactccggtggatttattagcccaaagaagcctaaatgatataaaaataactagtatatatatcaaatctatccgtttaatgcccgcttcagtcaacaacaaatttgaagtcatgcaatctgtgcaaagggattatttctgtattgatttttccgaatgcagcggagttgctttaggactcccgtttactttgccgtacgtcagcttgcgccatactaattccatcggaccgtacttaaatcgtttcaaccacaatgtactaaagctcataagcacgaagtacacggccagactgaacatgaacgtgccggcggattgaatatgatccgcaagcccgaatccgtacctgaggaacagaactgttccaatgatagagtgaagcagataacaggtcaatgacatccgtccgactttggtgaatatcatcatagggcctcgcagctgaggaacatacagaaacagcattgcaaaagtgctcatataaaacatacttccggttaagccgccattttgacccaagacagaggaaatgtccttccacagcatattctcagaaaaattaaacatgtctagtaatatactgctttgtgttattagaaaagcgattgtgctaatgatccagatacgcttccatatgaactttttcgcttccatgtctttgaaaaattccatcttaacaaagtacacgcccagcagaaacatgagaaacatggaatagatcatggagaaagagccagcagccatcgtgaccatatctgtccaccgagtgctgatggattccatgtaggtaaggcttgtgtggctaaacaaagtaaactctgaaaaattcgggttttttgaccctgcagtattgatgacattgtacaacattgtgaaaacaggagtcaggaattgaaacacgataagtgcgataatccatctaagcaccgttttggccgtgcgttgatagaaggcgagtaacaggaagccgcttacggcgtaaaaggtcaatatgtcaccgacccaaacaaatgtgatgtgcaaaatgccaaaccccaacaggatagataacctgcgggcaaacagcttgttgggactatctaccttctgcgcggctcgatccataaagatcataaacccaactccgaacaagaaagagaataatgtaacgaatttcccttcggcaaaccaggaaaccagattgtgcaggacgtcatcggaggccatttcgaatccctttactgaatctacgatcagaaaatagttgacaataataatgccaagcaaggcaaatccacgtacgatgtccagaaaatgaacccgttcccgcagactcactggttgcccgcgtccttctttttgtacaatcatatcaatactcctttcccatttaccattgcaatgtgcagtgcggatctgaaaaacttgagccttacaatggataaatataaagacagaatcttaacaatttatgaaggttcatcatttttttaaaaatgtgacaaacttgtggcggacatcagctttcataaactgttaagatttacgtggtatcttataacgtacgtgttacttatgaatgatatatagtaaggtcacacgagagataacatcaagaatcatgaggtgaaagaggcatgacccatcgaatattagtcgtagaggatgatcatgatattggtgatcttttggaggaatcccttatgcgagcaggctacgaggtgctaagagccaaggatggaaagcgagcattgcaacttgtgaatgactcgcttgatttggttattttggatattatgatgccaggcatctcgggaatcgaaacctgtcagcacattaggaaaacctctaacgtcccaattctgtttctgacggccagatcgagtacactcgataaaactgagggattactcgccggcggcgatgattatatgactaaacccttctcggaagaggaacttcacgctagagtgattgctcaattacgcagatatacaatctatcaggaaaagaaggaacaggaagaaacatttcttatcgggggcaacctgagagtgagcgaagaatttaatgaggtttacaaagaggagcagcaaatcaagttgtcagatctggaatatcgtatcttgaaactgctgatgagcaaacgcaacaaaatattttctgctcaaaatatatatgagagtgtgtggggacagccttacttttactgttctaacaatacggtgatggtgcatattcggaaactgcgctccaaaattgaggatgatccggcacgtccggtttatataaaaactgaatggggaagaggatatcgatttggcacatcgtaaattcacgctaaccaaaaaactggctttgctgatcatggttgctgcgattgtgagcggtgtgttctttctgacgttgcaaaagattacagatgatctgatcgagggatatttgagttcggatgagtattatcacaaggagtcagcgagatacattcaaaaattcagtcagtacgtttcagaaaatgggttgtctacatcggatagaaaagcgtttggcgagtgggtcaaaaaagaaaattacattaacctcaccatattcaaggatcaggagctgcaatatgattccgtttattccgaatccgattatggaaaagaaaagctgactcagtatgctcgaaatcattcacatcctgtcaagttcagcgatggtgaaggacgagtcattatcgacggtttctactcttcccgatattatgatctggcctttacattggatttgctcggtgcaaccctcatctttttaatcattgttctcttgggcatccgtcaaagtcttcgctaccttaaaacgcttcaccaagagattcatattcttgaagggggccagctggactacgagatgacgataaaagggcatgatgaattagcgatgattgcaaagagcattgaggatctgcggaaagctttcttggacaaacttaaagctatcgaggaattgcaagcagagagccgcagcctggttaccgaaatgtcgcacgatatgcgcacaccgctgacgtcgctgatcatgaatctggagtttgccaaaaaagaaggaggcgaagcgggtaccagcaaagatcgttatgtagccaatgcttatggtaaagcactgcaattaaaaaacttgtctgacaatctgtttgcgtatttcctgctgaataaggaacatggggccgacctggagaccgttgcagtgaaagaagtgatctacgatctaatatcagatcagattgctatccttcatcaggagcatttccgggtccatatttcaggcgagctgccggaaacctatattaacgtgaatttggaggagcttggtcgtgtatttgataatgtgatgtcaaacttatttaaatacgcagatccggaagaagaaatcagcatcacgtttgtatcggatcaagaaatatttgagattcatgttagcaatacgattaaacttgcggatgtaacaccggaaagcaacggactcggtgaaagaagcattgcgcgaatgatgtcccgcatgcaggggcagtttcacagtatacaaaagaattccaagtactgcatcgtgctgcgattttggaacagaaagatgtaggctgcgaatcaaaacgacgaaaatattgaaataggagacaacaagatgagattttccaacaatttcaaaaaagcaccttacctgttacaagcgcttctcaatgtctgcctgttcttcctggccatagccttaagcggacttctgatcagcgagacatggtacattgtgcaattcgtatacaagtcactgttcaacaaagtggacagctattatgagatgcttggggaactgcttatattcttcatgtactttgagttcattgctttgattatcaaatacttcaaatcagactttcatttcccgcttcgctactttatttatattggcatcacggctgtcattcgtttgattatcatcgatcatgatcaggcgatctcaacgttctggtgggcgatggccattcttgcaatgatttgtgcattctttattgtcaatagacgaaattctgttgttgaacattaataaattagttcactttataccgatacgccactgaaatgtcctatgacttacttgaatactaaataggtgtaaaaagtggttattcatacggattgaaaaagaagaacacgcagcagactcacttgctcttgttgggggcaagtgttgacaaccccattactggtttaattaaaagaaggagtataaaacctgtatcaatggtgttactagatatctgcgacacaggttttatatgtaggtaactaatattctgatatatgtaacattgcattttttattatgcaatagttcactctatttctgctttcaatttttcgaaccactctaaattaaccaagtgatgtgaacgggaattttcgttcatacggcgaaagtaattgattgtgctgggaatttcttgagtgatggacaggtattcgtcaaggagctcgattcgagttttagtctgatcgatttgtgattggatcagatccagtaatttatttttgtcgaattcatcggcaaagagtaacgccccataaaattgcaggttcacatattccgatttggtgccgtatttgatcattaatttttcgaattctgcccttcccgaatctgtgactttaaagttacggatttcacgcccgccggttgagggtttctgctgaatctgttcaatcaaacacttttcttcaagttgctgcagattgtaataaaatgaacctttcgtgaagttaacgatgtacttgtaatgacgtttttccattaaggccagaagttcatagccgtgagctccggggttttggatgagcaagccaaggataagtaagggaatcatggtttcatcaccttcgccatccgcgcctcaaattccgcgtacgtaattttacccgaagccaaatccatactatgaaggtaaatctgttctgttttagaatagtcaccattcactttcagtgattgctcctctcccgaaatgggtttcaggatatggtgctttttcgaaagagcctcgaaatagcggtaaccgaatttgcgttgtgaagctgcgtctaaatgaatgccatcaggattcgcagtcaaacctgccgcagtaacaaaataacaattctgttgttcattagcaaaacgcagcaattgttcattaacctgtcgaaattcagtcgcgtgctgtccaaaaccagtcttcccaagaaagtcaccaagccctccaataatcaacggtacctcatcaagtttcaactcgtttcttagcgtcccgatgataagagttaatttctcgtaataagtttcatgcagcgaacgataactgtcactctcaccttggtgccaaaggattccgcaaatttgactggatcggagggcgaagcgggtttcggacaaagcatgctgaaaaaggatgccttccggatgccagtcattcaatgaactgccaccttccgcacacgggatcaagccaatttcttcatcgggatgagctttcgaccatgcatctgcaaaagatgcggccaggccaacgccggaaaccggacggtcgtaattaatcggctctgtcatcatctgccactgtccattgcgcagcatttttattttttcattatagatagggtctacttcattcaaaaatccacggcccgccatattcgactgccccaacattaaaaaagactttatcatctaatttttcacttctttacatcaatattttagtctaattagactatagtcaattcagcttgtcttgtaaagtttcaactaggttttatttttttattagtatgtatgaaaaacaaactaacattgaaaatttggtggatgtatttgagaattagcaagttcttttgctttaggtcttgataaacaatgaaaaaacaacaaaaaccctgtcatgtaagggttcctatgaggttcaaaatcatttttcataggaaatacattcaatgttgggggtgtagcccaaatgaaatggattgttaaaaagggagggctatgttgaaggggtaaaatatcaatgaaaaattattaaaaaggttaacgattgtaccaattctattcatttgttatgttttatttttaaatcctgaagttatacttgaagagcaatgtcctaaaatgcagaaaaagccgggatgtcagatccggcttttcgctcactttcccttcttcttccgcttctccttctccgcccgataaaactcatggaacatcttcatcaatgcgcgtttttcaatccgcgacacgtaactccttgaaatgccgagctcctttgcgatctcgcgctgcgttttttctttttttaaatcaagcccgaagcggccgacgatgacttctttttcgcggtcgtctaaaatatcgatatattttttgaccttttcaagttccatgttcagctgaatagtgtcgatcacatcttcgctttccgacttgaggacatcgatcaggcttatttcattcccttctttatcctggccgatcggatcatgaagggagacgtcttttttcgtttttttcaatgcgcgcagatgcattaaaatctcattttcaatacatcgtgcagcatatgtggcaagcttcgtgccttttccggctgagtagctttcaattcctttaatcagcccgattgtaccgatggagatcagatcttctgcgtcctctcccgtgttttcgaattttttcacaatatgggcgactaaacggagattgtgttcgatcagcatgttgcgggcgtgttcatctccttcagccataaggtctaagtattttttctcctcactatttgagagcggttgtggaaaggcattatttttcacgtatgatactaaaaacacgagttctttcacaataaacccgagcgctgcaaaaacacctgtcaccatcctcacctccacaaagttatgtaggcaaaagcctatatgtaactgtatgtggcagtcaggctgtttgtgtctgtacagggaaattaatcaaaggcaggttttatttcttacagcctcttgatttttgctgattgagcctgtatattgttaaaaaaagtaagggtgaaaacaatataaccgaaaagcgctgaagagacgagtagacagatatcattcatgacagagagctccgggagctgtgaaggagtatgaatggatgtgttgaagcaaacctcttagcttcgcatcggaatcatgcaacacgaggatgatgcggcggatactcctgttaccgagtaagctttgtacccggcttaggccggcaccaaaccgaattgaggtggcatagcgggctgtttcccgtcctcaagactttattgtcttgagggcgttttttatttttaagggagggataagatgaaaaacctgaagtcttggcggtacccgatgcttctgttaaccggaatcgggatagcaaatattggtgaatggatttattttttgtctcttaatcttattgttttaaaagaaacggagtctgcttttgcggtttccattctttatttaatcaggcctgcggctgttttgatgacaaatgggtgggcgggcagcatcatcgaccggtgtaacaaacggaatatgatgatgtcgcttgatttcatccgggctgcattcattgccgttctgccgctgatgtttactgtacggtctttgttttccgtttatagtatcgtgtttttgattcaaatggccaatgcgatgtttcgtccgagttccatggcgtatgtgacgatgcttattccggctgaaaggagaaaacgattcaattcactaagggctttgtcggaatcaggggcttttctcctcgggccggctgcggccgggctgctttttatcgccggcacgccgatttttgcgatttgggtgaatgcgggggctttagtgctgtccggtttcatcacgatgatgctgccgaaccttgaaaatgagcctcacgtacattctcccagacagaagctttctttggcagtgtgcaaagaagattggaagctcgtctatcgcttcagccgaacggcgcgaaacgtcatgatcatttattttttattcagtctggtcatgaccgttatgccatcagcgcttgattcgcttgaagccgcttttgcaaaagaggttcttcagctgactgatgccgattacggttttctcgtcagtgtctcaggggcaggcattatcgcgggggcgcttgtcaatgtgttctttaataaaaaaatgccggcttctttattgatgggaatgggctctttattcacagcggccggatatatgatttatgcgttttctgacgttttttggacggctgctttcggatttttccttctcgctttttttctggcgtttgccaatacaggctttctgacgttttatcaaaagaatgttccggtggacatcatggggagagtggggagcttttattcattaatcgaagccgtcttcgttatagtagtaacggcggtattcggagcggcttctgtcagttcttctgtccgcggcatcgtcatcgcaggcgctgctgttatgctggcgttggcagccgttttatgctcgttcttatttgcggccgcaaaaaggaggactcctgatgtatttcaagcggatcaatttaaacaaacataaagagacggccgtttcatttcgtgaggattcgtttttcgtcagctttggcacggcggatcattttaataaggatgaatatctcaggtggctgtcatcccaaatcaaatgctttcccgacggttttatgccgctttttcataacgggcagccgatcggacagcttgaagcttccatcaaattttaccgcagccaaaaaatcggttatgtgcacctttactatatgactgagcagcagaggggaaggggttgcggaacgaaactgcatcaatacgtgaggcagtttttcagagcgaacggtgtttcggaatatcacctgagagtttcgccgggcaatgaagaggctctgtcattttacagaaagaaaaacatggaagtgatcggttcagaatgtaacggaaaagttctcagaatgagaggagccgtaccgccggaatagggggcggtacgcgcttcattttttcgttgtttttaaaaggccgggaaacttcttataaatgaccgccattaagatgagcatatacattccgtaaatcccgaaagacagcagtttgttgcttgtaaatgaagcgcctgcgacggtcacgatcacaatgttcggaattttgccgagcaccgacgcagaaaaaaagatcggccatcggatattactcagcccgcagacggtattcatggcaagcgacggtataatcggaatcagccgcccgaaaagcaccgccgtaaaagcgtgctgatgaaatgaatcttcatattgggccgctgccgggtaagccagcagcttttttctggcccagtctctgaatccgtaccggacgagaaaaaacaatgccattgttccgagcatcgcgcctgacaatgtaatccacaccccgtttacaatcccgaaaaccgctccgtttaaggccgcgataatggcgaatggaacgatcggaaaaaatacgtcagctgcgaccagaaggatactcataagcacggcgtacatgccgcccgcgcgaatcatgctgagccagacgtctttttgcataaagccgatcatcacgacagcaatgatgacggcaagactgaatcccttttttatcatctgcacgttcacctcttttcaattagtatacagcacaaatctatctccttctattaaaataagctgtccgataagcgtacttgtttatcagcatttgccgtttgatgagaaacggctggcacccggatttggacaaaaacaagcgggaagcgggtgatgtgcatcatttgatgcagagaatgattttttataaaaggggacacgttaacagtagtgtttactggaggtgtaaacgttgagatgctttcatctgatcatcatgatatgcgtcctcacgagtctcactgccgtgtccgccgaggcgaaatctttaaaaagaagtgacatggagaagacgggaaacgtgtactgggatataaggtctgaaaaaaagaaactatctttaaccttcgatgacggcccccatcctgtctatacggaggctgtgttagacgtgttgaaacagcacaatgttaaagcaacctttttttgtgtcgggagccgtatagataaataccccataacggcaaaacgcatcgttgaagaagggcatgaaatcggcaaccatacgatgaaccatgtttattttcaccgactgaaacgcaaagacattttacaagagcttcacagctcagcgcatcatattacatcgctgcagccggaaggggacaagttattccgcccgccgggagggtcgctgaatcatacggctttcaaaagcatcttaaaagagggctatcatatcatcatgtggtcatggaaccaagatccgagggactggaaaaggcctgggaaaggaaaaatcgtcaggcacgttgtttcacatgccagagatggagatatcgttcttctgcatgacggcggaggaaaccggcgccagacggttgaggctttgaaagaaatcattcccaagctgaaaaagcagggctacacgtttgttaaggtttcggatttgatcggacaggattccggtccttttcatatccagtaaagagagcgccgcgttgaaagccgccaaagagatgtgtaccataggaggtaaggtttggggggagagaaaatgaagtttgctgttctttttattacgataatctgtctgttatcaggatgcgccgcgggcaaagaaaaaagtgttgtcgcgttcggcgacagcaatacgcgcggttccaactgggattatcgtgattatccgaaggcgcagcagtgggtaaacattttaaaaacagcggaacgcggccgtcttacagttataaatgcgggaataggcggccagacgactgaggatgcgcgcctgcgttttcaaagcgacgtgctggaccgtaagccccaatatttatttatcatgttcggaacaaatgatgcgggcattttgacgggcgatcagccgcgggtatcaaagaaacggtttaaagaaaacctgacttatttcataaacgaaagcagaaatcacggcataaagccgattttaatgacgtgcatcccggttatagaaggaaacggaacgcatcatctctattactattcgagatataaagcctcagcctttaaagaaaaaggcggcgcgagaaaatggcataattcctataacggcgttacgaggcaggttgcagctgagttgaaagtgccgctggtggataactggaaacactttatacgcgcggacggcggcaaagatacagaccgggcgctgatccaatccggactgatagatccctccggaaatcatatgacgccaaaaggcgccagaatcttaattgaaggcataaaaaatgggcgggttttggaacgctgacgccgtcagctgcctaaaccgttttgcttctgattcataggctgtagaaaaaacatctttttggaggcgattgctatgaaccgcggtttccctccgcaatatcctgtatgcccgcctcctcgggtgaatgcggggtactggtacgcattttttgttgtgctgctcgtcgtcattctcgtcctgggcggtctgtattggttcaatatatagcagccgtcctcttaaacacctctattttaggggtgttttttgttgaaagtggtagtaatgcgcataaccgaagtgatataatatcagtcatctgagtaaaaaaaggaaattcgcccgggaatttttttctgtttaagaagaaacggaaataatgtgtccgagcgatcttcttttgatttcgttttcaattaactcgataaattcacggctcaaattcatttcattggctttgaaataagattctattagtaattcatcagaaagctttctcatgccggggacccaattaatgggagtggcacctccttataattgtaatcaatcatcagacgcaagcatatgatggaaggttgcgtttcaatcatggtgaggttatctttaatctaccatgaaatacaaataagaacaatcgttctgttatccacactcgtaagtggataacttgttagtatcttgtttataatttggataaatccggatgtaataagagtggataatgtgtgtaattttatccacaactggtgaagaaacccaatttttgtcgaaatttttttactgagtccgactttgtttttaaatctgacaggtttcgacatatagatgatagaaagaaaaggaagggtgcgggttttgttaaaaaagttttttttacctgacgaatttgtgaaaaatatatttcatatcacaccggaaaagctcaaagaacgcaatgtgaaagggattattacagaccttgacaacacgcttgtggagtgggacagaccgagtgcgacacctcgattaatcgagtggtttgaagaaatgaaggagcacggcattaaagtcacgatcgtctccaataataatgaacgaagagtgaaattattctcggagccgcttggcataccgtttatttataaggcaagaaaaccgatgggacgcgcctttaaaagagccgtcagcagcatggatctgaaaaaagaagactgtgtggtcatcggcgatcagctgcttactgatgttctcggcggaaacagaaacgggtatcatacgatcctcgtcgtgcctgtcgcttcctctgacggagtcatgacgcgctttaaccgccggattgaacggagaatattgagttctttgaaacgtaaaggccatattcagtgggaggattagaaatggaaaaggttgtttgcatcggctgcggagtaacgatccagaccgagaataaacaaggtctcggatacgcgccaaaggcatcgctcacgaaagagaatgtcatctgccagcgctgcttcagactgaaaaattacaatgaaattcaagatgtttcattaacggatgatgactttttaaatatcttgcacacaatcggcgatactgactctcttattgtcaaagtcgttgatatttttgattttaacggaagctggataaacgggctgaaccgctttgtcggcggtaatccgatcattcttgtcggtaataaggccgatatcctgccgaaatccgtaaaacgggaacggctcgttcaatggatgaaacgcgaagcgaaagaatacggcttaaaaccccttgatgtctttttaatcagcgcttcccgcggacaagggatgaaggaagtcattgacgccattgaacattatcgcgaagggcgcgatgtgtatgtggtgggctgtaccaatgtcggcaaatccacatttatcaaccggattattaaagaggtctcaggggaagagaatattattaccacctctcaatttccgggcacgacgcttgacgcgattgaaatcccgctcgatgacggatctgcgctttacgatacgccgggaatcattaaccatcaccagatggcgcattacgtggacaagcgtgacttaaaggtgctgacaccgaaaaaagaactgaagccgcgcacttttcagctgaatgaaaaacaaacgctttatttcggcgggcttgcccggtttgactatgtatcaggcgataaaacggcgtttgtctgctatatgccgaatgaattgatgattcacagaacaaagcttgaaaatgctgatgccttatacgaaaagcatgcgggagaactgcttaccccgcccggaaaagatcatttggatgaatttccggagcttacgccccacacgtttacgattaaagaaggaaagacggatatcgttttttccggtctcggctgggtcacggtgcagcaagcagataaaaaaataacggcatacgctccgaaaggcgtacacgtatttgtccgccgttcattaatatagagagaaggggagagggagcatgaaacaattgtacggagtaatcggtaatccgatcgggcattcaatgtcacccgatattcataacgcggctttgcaagataagaacatcaacgggcagtattttgcgtttcaggtggaacctcatcatctcaaggacgccgttaacggaatcaaggcgcttggcatctgcggagtgaacgtcacagtcccgcataaagtcgcgatcatggagcatctggatgaaatacatgaaagcgcgaaagtactcggggccgtaaataccgtcaaaagagagggagacaggctcatcgggtataatactgacggagatgggttttataaatccttagtcaaagtattggacaaaccgatatcagagctctccatcctcatgattggggcgggaggagcggcaagagcgatttttacgacgatcgtccgcggagagccgaaacaatttgacgtttgcaaccgcacgccggaaaaagcggaaagcctgattgcggctgctccctcttttcagcagaaacgcgcccttactttaaaagaagctgaaaatcagcttgaacaatatgacgtcattattcatacaacatctgtcggcatgtatccgaaaacggatgccgtgccgctctcattggaacgggccaaaacgggcgccatcgtttgtgatatcgtatacaacccgattcaaacggcgttcttaaaagaagctgaaaaaagaggtttaacaacccttgacggtgtcggcatgtttgtggaacaggccgcactgtctttcaagctgtggacggaacaagagcctgacagcggcttaatgagagcgattgttgaaggaaaactaggaggaacacaatgttaacaggaaaacaaaaacggtttttgcgttcaaaagcgcatcatttaacgcctatttttcaagtgggaaaaggcggagtcaacgaaaacatggtgaaacagattgccgaggctttagaagcaagagagctgattaaagtcagcgtgcttcaaaactgcgaagacgataaaaatgatgtcgcagaagcccttgtgaaaggcacccgctcacaattggtgcagacgatcggaaatacgatcgtactgtataaggaatcaaaggaaaataaacaaatcgagcttccgtaaggtggttgacatgaagaaaatcggaatattcgggggcacatttgaccctccgcacaacggacatcttctgatggctaatgaagtccttcatcaggcggagctcgatgagatttggtttatgcccaataaaatccctccgcataagcagaatgaagactttacagacagccggcaccgggtggagatgctgaagcttgccatcagctctaattccggctttaagcttgagcttgcggaaatggaccggaaaggcccttcttatacctatgataccgtccgtttactgaaggagcggcacccgaacgacaagcttttctttattatcggggcggatatgattgaatatctgccgaaatggtacaaactggacgaactgctcacgctcattcaatttatcggagtgcggcgcccggggtatcatattgagaccccgtacccgctgctttttgccgacgttccggaatttgacgtttcgtcaacgatgctgagagaacgtctcaaagcaaaaaagccgacgcaatacttaatgccggataaagtgaggcagtatatagaggagaatgatttatatgaatcgtgaggaagcacttgcctgcgtcaaagaacagctgaccgagcatcgctacatccacacaatcggcgtgacagatacggcggttattctcgcaggccggttcggagcagacccgaaaaaagcagaaatggctgctatttttcatgattatgcgaaattccggccgaaagaagaaatgaagcagatcatcgtgcgggaaaaaatgccggctgagctcttggattacaatgccgagctgtggcatgcccctgtgggagcgtatttggctgagaaagaagcggggatcactgatcctgagatcttggatgcaatccgctatcacacgtcagggcgtcccggaatgacccttttagacaaagtcatttacgttgcggattacattgaacccggacgccatttccccggagtggaagaggtgcgccgtctggcggaaacagatctgaacgaagcgctcatacaagcaatgaaaaatacaatgatatttctgatgaaaaaaaaccagccggtctttccggagacgtttgcaacctataattggctggtgtctcaaaattgacaggaggaatttaaagaatgaatcaagcttccgtattaaaaatcgcggcaaaagcatgcgacgataaacgtgcagaagatattttagcgctggacatggaaggaatctcacttatagcggattactttttaatctgccacgggaattctgataagcaggttcaggcaattgcgcgtgaaattaaagatcaggcagaagaaaacggcattgatgtcaaaaagatggaagggtttgatgaggcccgctggattttagttgatctcggcgacgtcattgtccacgttttccataaagatgaaagaagctactacaatcttgaaaagctatggggcgacgcgccgctcgcagagcttgaactcggcttgaactcatgatttaccaaggcttcgccggcgtatatgacgagttaatgtcacatgcgccgtatgatgaatgggcgggctggatcgaagcgtctcttccggaaaagggaagggtgcttgatcttgcctgcggaaccggagaaatatccatcaggcttgctgaaaaaggctgcgaagtcacggggattgatttgagtgaagatatgctgagctgtgcccagcagaaaaaaacgggaaagccgattctttttctccagcaggatatgagagagctttccggttttgaagaacagtttgatgccgttgtcatctgctgtgattccctaaattacttaaaaacgaaaaatgatgtcttaagcaccttcaaaagtgtttttcaagttttgaaggagggcggcctgcttctgtttgacgtccattccccatttaaaatgacggagctttttccggacagcacccatgcggatcaggatgagcagatcagctatatctggcaaagctttgccggcgatgaagagctttctgtcatccatgatatgtcttttttcgtatggaacggacaatcttatgaccgctatgacgagacgcatgagcaaaaaacattttacattgaagaatatgaacaaatgcttgcagagaccggatttgaactgaagaaagtgacggctgattttacagaccggcctccttcaacagagtctgaacgtcttttctttacggcaggcaaaccaaaaaccatcgtttaaacggaacgatggtttttaaaatgcattttttgcgattggcgcgataaagctctttatggcatactcatttacacgtgaaattgcttcttcactaacgatatatcttcatcgtatttgtcatgtgtacgctgaaagacacggttgaacatatcctgaacaccgctttcgagagccttcagtccttctccggtgacgccgccttttacgcatactttttcctgcaaggcgggaagcgtgtaatgccctgtttccagaagctttccgagaccgacaagcatttccgtcgacattatcacggcttcttctttggtgatgtccgtttcttccactgccgcgtcaataaagcgctgaacgagataactcataaaagcgggcccgcagctgacaatgtctgacgccgctcttgtaatgccgctgctgatttccacaggttttgaaatatgagtgaacagcgtttgaatatccgcttttgcagcctcgctgcagcttttgccgaacgtaacaagcgagacgccggccaaggcgcggttcgtaatgctcggaatgacgcgggccgtctgacacggaaccgtatgttcaatctgatccgtctgaacgggactggtaatggagattaaaatgtgatctttccgtaaatgcggtgtgagtttcttcagcaaaggatatatatccagcggttttacacaaatgaatattatttcattatcctgtacgagcttttcctgatcctcggtgacatggatgccgctgaaacgttcttttagttttaatgctttttcgattgttctgtttgtgatggtgatatgtgagggatcggcagcgtttgattcgataaacgattcaatcaggatcgttcccatgtttccggtgccgataaagcctattttcaatgaattcccctcctttttcccttaatcctctaaaccttatgcggggaggcaatgcaatatgacgaaagcgatgatgacggagcggctgcggcggaacctgaaaattctgggcgcttgtcttgcggcaggggcggtttttatctgtatttggctgtttcgttctgacaaggaagagccggtcaaacagcagtccgtgctcggccaaacagcctcagcatccgtcgcggacaaaaaagacaccgcagccgacaagattatgattgatgtgaaaggcgcggtccgaaatcccggcgtatatgaaatgaaagcgggagacagggtgacgcaagccattgaaaaagccggcggcctgaagaaaaaggcggatgaattgaatgttaatttagcagagcagctgcaggacgggacgattgtttatattccgagtgaaggcgaagaggagaatcgcccgaaaacagcggcgggtgaaaaggagaatgcagctgtcaatatcaatacggcatctctggacgaacttcaggcaatttccggggtggggcagaaaaaagcggaagcgattatcgcctaccgagaagaaaacggacggtttcagactgctgaagatttgatgaatgtatcaggctttggagagaagtcatttgagcggataaaaacttccattacggtaaagtgaattgacggttttgcttaaatctatgtaaacttagaaaagcaacaagactttttggagggaacacttgtggaacgaatctcatggaatcaatattttatggcgcaaagccatttgctggcgctgagaagcacatgtccgagactgtcagtcggggcaaccgtagtcagagataagcggatgattgccggcggatacaacggctcaatcgccggcggcgtccattgcgctgatgaaggatgccttttaatagataatcattgccagcggaccatacatgcagagatgaatgcgattctgcaatgttctaagttcggtgttccgacggagggcgccgaaatttatgtgacgcattatccttgtattcaatgctgcaaatcaattatccaggcaggcatcaaaacggtttattatgcggaagattacaaaacacagccttatgcaaaagagctgttcagccaagccggagtcaaggtggagcaggtcgaacttgatgaaatgatcatcgatctgaaaaaccgcgaaaaattgtcttttgtagcaggtctgattcagcaattatctgatgcgggggttaaggcagatgaactgaaaaaaattcatgaacaggccaatgagctgtttaccagttacgtataaatgaaatataaataccttcttctgcctctggcggcggtttctgcaactgcgggaattgccgccgctcatgtcttctgggttctgctcctttttcttctgtatcttctctttattattgtaaaaacaaagcagtatgctccggttatcgtctgcctcgtttctttttgtctttatttctttctttatacggtttgtgacgctgcgaatgtaacgcgctatcaggccggcagttatactgaacaggccgtcatcactaatattccgaaggttgacggagcgaaaatgtcagctgttatccgtacacatgacaaggaaaaatgggcggcttcgtacaaaatccgttctcttgaggaaaaaagactcattgaacagcttgaaccggggatgcgctgcacgtttacaggctctctggaacagcctgcacatgcgacggttcccggaggttttgattataaggaatatctttactctcagcagattcactggttattttccgtgacttccattgagcagtgtgaaaaatccaaacagccgctgtttaaactgctgaacatcagaaaaaatttgatttcgatcattcggaatcacgtgcctgaatcttccgccggaattgttgaagcgctgaccttaggtgaaagattttctatagaggacgatatactgagtgcatatcaaaatttgggagtcgttcatttaatggcgatttccggaatgcatgtcggtcttattacggcgggattattttatgctctgatcagaatcgggctgacaagagaaaaggcgggaattttgctgctgctgtttttgccggtgtatacgctgctgagcggtgccgccccatccgtattgcgcgcatccctcatgctgggattttatatcgccggaactcttgttaaacgcggcattcattcctctgctgcattgtccctgtcttatctgctgctcctgctgtttaatccttacttcctttggcaggcgggcttccagctttcctttgcggtaagcgcctctttaattctgtcatcctccattttaaagaaagcaggggaaagcagacttgccgggcttgcgatggcttcattgattgcagagctcagctcacttccgtttcttctctatcattttcagcagatttcacttgtcagttttccgatgaatatggtgatggtgcctttttatacgttatttgtcattccggtttctgtcatcggtttccttcttcttttactctcaaggcagatgggagaatgtttgtttggtatgtttgaccttgtgatgaagcctgtgcatgatttcattacatatgcggcatccgttgatttatttactatgattgtgtcaaagcctgactttctttcccttcttctgcttgcggtttccgtttttacgctttttgcggctttggaaaagggaggttttttaaaactcaggaagtcggctctttttttctgcgcggttttggcttatttaatatgccgtccgtatttcagtccatggggagaaacggatatgcttgatatcgggcagggagactcactgtttataagtgcgccgtaccgcaaagggaccgtaatggttgatacagggggagtgattgcttatcccggagaatcatggaaagaaaaacgtcacccgtattctatcggcgagaaggttttgattccatttttaaacggaaaaggggtgaaaaagctggatgcactgattttaacccatgcggatcaagatcacatcggggaagccggagtgttaatcaaaaatcatagagtcaaacggttaattgtccccgtaggattcgtaaaagaaccgaaagatcagaacatattaaatatggcgaaagaaaacaacattcccgttgccgaagcaaagcggggcgacaccattacagccggggatcttcagtttcaggtgctgtctccggagtcgtctgacggaaggagtaaaaatgattcgtcactggtgctttggacggcttttggcggagtgagctggcttttaacgggagatttagaatcggacggcgaaacagaagtgctgaaaacgtatccgaatctgaaggctgatatattgaaggcgggtcatcacggcagcaaaagctcaacgagtgaagcctttttgaagcagcttcagccggaagcagcgctgatttcagcaggaaaagagaatcgataccatcatccgcatgaagaagtgctggatcgtttgaaggcgtactctgtcaatgtgcttcgcaccgatatcagcggaacgattcaatacagatttaaaaaaggcgccggaacgttttccgtcttccctccatatgatatagaagaaaccagggcgcaagaagtaaaaaagactgccgattgacagcagcccggaatgcggctaagagccgataagatggatggctgttgccatcacgaacaaaaaggcgaaaaatccgaaggacacgacaaaaccgacagctgagtcaacagcatcatttcgtttgctttgaacgtttttttcaaaatcattcaatttcatccctcctgacttccctaagtatactggaattgttttgaaaaatctagaagtgatggtaacgttttctgttcttgtgattatcgcctttttacaagcagacccgggagcttgtgaatcaggcgtttattataaatgaggaagctgtccttaaagcttcctctttactaattgccgaactcaatttaggatagaaggggatcaagaaagagaggaagtcatacgatcatggtatttgatgtttggaaagccctgaaaaaaggggatgtccgctccgtttattgtttatacggaaaagaaacgtatctgctccaagaaactgtcagccggatcagacaagctgtcgttgatgaggggacaaaggattttaacctgtctgtttttgatcttgaagaagatccgcttgaccaggccgtaaccgatgctgaaacgtttccgtttatgggagagaagcggctggtcatcgtaaaaaatccgtcttttttaacaggggaaaaaaagaaagaaaaaatagagcataatacagccgctctggagacttatctgaaggagcctgcgccttacacggtctttgtgattgtggctccgtatgagaaactggacgaacggaaaaagctgacgaaagcgctgaagcaaaaagcccttatgattgaagctaaggagctgaatgcaaaggagacgacggattttacgattaatctggcgaaatccgaaaataaaatgatcgatacagaagctgccgagcatttggttctgcttgcaaacggccatctgtcttccatatatcaggaaatacaaaaactctccgcctacaccggtgacagacatgagatcacacttgaagatgtccgtgagctcgtcgcaagaagtttggagcagaatatttttgagctgatcaacaaaatcgtgaaccgaaaacggacggaaagtcttcaaatattttatgatcttttaaaacaaaacgaagaaccgatcaaaattatggcgctgatcgccaaccaattccgtctgattatgcagacgaagtattttgcgggacaaggatacggccaaaagcaaatcgcttccaacttaaaggtgcaccccttccgggtaaagctggcgatggatcaggcgaggcttttttctgaagaagagctacggcgtattatagaaagactcgcagtgatggattatgaaatgaaaacggggaaaaaggacaagcagctcttgctggagctctttctccttgagcttctccggactgaatgaaaaaaacgatccccgttaaagggatcgtttttgtattatgcagaaagtccgttcacttgtttcgcaagtctagatttgtatcgagctgcggcatttttgtgtacaagacctgttttcactgctttatcaatgcgtttcgctgcttcagaaagagcagttttcgctttatccgcttcgttgttagcaacagaagcttcaacttgtttgattgcagtacgcatagcagatttgattgtcgcgttatgagcgcggcgttcgttgtttgtttttgtacgtttaatcgctgatttaatgtttggcatgtgtttcacctcctaagatacaacctgtagcacagtgtcttaaggttaaatcttcttcacaatagaacaaattgtattctatcaaacagaactttagattgcaatataaatgtaaagtatttttcgttgatgggtaaattcgcatgattcgttttgtaaatggccacactatgtaccacgatgattgaaggaggtcttccctgtgaaaaacaacgaactggatgtcaatcaatttctgatacggacggatttagcggtagaaacgaaacaggcggtaaaagacggacaagccggtcagaaaaaagaaataaacgggtttattgaaaaagaacgcgacaagggcggcattaaagtcagaaccgtcgatattaccaaagaaggcgccgagctatcggggaaaaagcagggacgctatgtcacgatcgaggctcaaggggttcgggaacacgactctgacatgcaggaaaaagtaacggaagtgtttgccgaggaattttccgcctatctgtcggcattaaagattccaaaggatgcaagctgtttgatcgtcggtctcggcaactggaatgtgacgccggatgcgctcggccctctcgtgaccgaaaaccttcttgtgacaaggcatctgttcaggcttcagccggaaaacgtacaggaagggtacaggccggtcagcgcgcttgctcccggtgtgatgggattaacgggaattgaaacgagcgatattattcaaggtgtgatcaaagaatcaaagccggattttgtgatcgcggtagacgctcttgcggccagagccgttgaaagggtgaacacgaccatccaattttctgatacgggcattcacccgggatctggcgtcggcaataagagaaaagaattaagcaaggaaacgctcggcattcccgtcatcgcaatcggggtaccgactgtcgttgatgcggttacgatcgcaagcgatacggtggattatatattaaaacatttcggaagagagatgaaagatgacagcccgtcaagatctctggtgcccgccggaatgaacttcggcaaaaagaaggtgctgacagacgaagaccttcccggagaaaaagaacgccaatcctttctcggtattgtcggcacgctggacgaaaacgaaaaacgccagctgattcacgaagtgctttctccgctcggccataatctgatggtcacgccgaaggagattgacacctttattgatgatatggcgaacgtacttgcaaacgggttaaacaccgcccttcatgaaaaagtgtcacaagataacaaaggttcttataatcattaaaatggttctacctcctctagcttgttcatagagtaattactagacaagcgctggagggattcaaatcatgagaaaaaaacgcagaaaccgtcaaattgtcgttgcagtaaacggtggaaatgcgctcaagggcatgtttttgtttatgacaagccttatcgttattttcgtattatcgggtgtgctcacatcgcttcgccctgaactgaggctttcttcggattctcttcacggaattgccggagaacttccgggtgacgcgtttgcacacctcctcggcatggaaaatcattatttcgcctcagagcttcctgaaaaagactcttttcagctgtcacggctttccttaaaactggcgacaagcattaatatggaagacccgcggagtttcttgggacgtgagctgccgggatttgcccaatatgatacggagatccttctggcggggcaggggacggattatacgaatatgccggctgaatctccgccgccgtcaaaggtgatggaaaaagaaaaagaagtgaatctggcagaaatcgaaaacaaaacgaaaaaagaagaaacggcgccgccgaaacattcaacaggcagcaaaaaagtcgtttttatttaccacactcataataccgaatcctatcttcctctgttaaagggggaaacaaatccggataacgcccgccattcgaaggccaatgtcacgcttgtcggagatatgttcggaaaagcgcttgaagcgcaaggtgtaggagcgaccgtagataaaaccgacattcaggcccgcctgaacaaagacggtttaaattatgcgcgaagctacgacgaatcaaggccggtcgtaaaaagcgcgctcgccaaaaataaaaacctgcaatataccatagacattcaccgggattcccgccgcaagaaaaatacgacagccgacatcaaaggaaaaagctatgccagagtcgccatcgtcgtcggcaaaaaaagcgctaattttgaagaaaactataaactcgcaagtgaacttcataagctgatggagaaaaaataccccggcttaagcgtcggtgttttatcaaaaggctctccgggagataatggagtatacaaccaagatttaaacgaccggtcgcttctgctggaattcgggggcgtggataacaatcttgaagaactgaggcgcgcatcagatgccgtggccgatgtgttcagcgaactgtactgggatgcagaaaaggtcagctcgcaatcaggagagaagaaaaaacaatagaaatcaggtgattcgaatgatccgttttaccggcaaatgcctgctgatcgccattgtcatgtttttcggcgtattgttcggcatgcagcaggcaaacagcggaatgcttgatatgaaaggatacaaagacccttccttaaaaggagcattcacgctcggcggcggagaaggacaggaaaaagaagcttccattttggggcaaaccgttacggcgaaagatctggaagaaaaacaaaaacagctggaacaggcggaaaccttcaacctgttttcaaaagccggggaaaccctttcaaataccgtgacggactcggcgcaggcgatgtatgagtgggtttcaaaactgaaccgttagcattgatgaagagaaaagcggatgattccttaaaggaagcttttctctttcttgttttaattgaatgtttacaatcctattgatataatctaagctagtgtattttgcgtttaatagtaggagtgatagattgtgacagataaagaaaagcgtttagagaggcagtcaagaatccggaatttctccatcatcgcccacatagaccacggcaaatcgaccttggcggatcggattttagaaaaaacatcggcgatcacccagcgggaaatgaaagaacaattgcttgattcaatggaccttgaacgcgaacggggaattaccatcaaattaaattccgttcagctgaaatacaaagcaaaagacggagaagaatatatatttcatctcatcgacacgcccggacacgtcgactttacatatgaagtatcgcgaagcctggctgcctgtgaaggcgcgattctcgttgttgatgcggctcagggaatagaagcgcagacattggcgaacgtctatctggcgcttgataatgatcttgagattcttcctgtcattaataaaatcgatcttccgagcgcagagccagaacgtgtgcgtcaagaggttgaggacgttatcggccttgacgcttcagacgccgtcctcgcttcagcgaaagcgggcatcggcatcgaagacattttagaacagatcgtagaaaaagtgccggcccccgcgggagatccggaagctccgctgaaagcgctcatctttgactcgctttatgacgcgtaccgcggagtcgtcgcgtatatcagagtcgtagaaggaacggtcaaaccgggccagaaaattaaaatgatggcaaccggaaaagagtttgaagtcatcgaagtcggcgtcttcacgccgaaagcccagccggcagacgaattgacagtcggtgacgtaggctatttgacagccgcaatcaaaaacgtcggcgacacccgtgtcggtgatacgatcacgagcgcggttaagcctgcggcagaagcgcttccgggctaccgcaaactcaatccgatggtatactgcggactttatccgattgacacagccaaatataatgatttgcgcgaggctctggaaaaacttgaattgaacgattcatctcttcaatacgaggcggagacgtcacaagccctcggcttcggcttccgctgcggttttttaggaatgcttcacatggaaatcattcaagagcggattgaacgggaatttaaaattgaccttatcacgaccgcgccgagcgttatttatgacgtttatatgacggatggcgaaaagatcatcgtggataacccgtcaaacatgcctgacccgcaaaaaatagagcgggtggaagaaccttatgtcaaagcgacaatgatggttccgaacgattatgtcggtgcggtgatggagctttgccaaggaaaacgcggcaattttatcgacatgcaatatttagacgcaaatcgtgtcagcattgtctatgacatgccattagcggaaatcgtctatgagttttttgatcagctgaaatcaagcacaaaaggctacgcgtcctttgattacgaactgatcggctacaaaccgtctaaacttgtcaagatggacattatgctgaacggagaaaaaatcgacgccctttcatttatcgtgcatcgcgattacgcgtacgaacgcggaaaagtaattgtggaaaaactgaaagagcttattccgcgccagcactttgaagtaccgattcaagcggcgatcggacagaaaatcgtggcccgctcaaccattaaggccatgcggaaaaacgtccttgcaaaatgttacggaggagacatctcgcggaaacggaagcttcttgaaaaacaaaaagaaggaaaacgccggatgaagcaggtcggctcagtagaagtgccgcaggaagcgtttatggccgttcttaaaatggatgacagcccgaaaaaataacggaagccgccgcagtcccgcgctgcggcttctttctgtaaagaagaaggtgtttcaaaatgaaatcagcttatattcatattccgttttgtgagcatatctgccactattgcgatttcaataaatattttattcagagccagcctgtcgatgagtacttaaactcactcgaaaaggaaatgataaatacaatagaacggacgggacgccctgatctccgcacgatttttatcgggggaggcacgccgacatcgctctcacccgtccagctggaaaaattgatggattccattcaccgcgtgctgaagccttctgacggactcatagaatttgccgcggaagcgaatccggatgatttgtctccggaaaaattaaaaatcctgaaaaatgccggtgtcaaccggctgagcttcggtgttcaaacctttgaagatgagcttttacaaaaaatcggaagagtgcataaacaaaaggacgtattcacttcctttgaacgtgcgagggctctcggcttcgacaacatcagtctcgatttaatgttcggcctgccgggtcagacgctggccgatcttgacaattccgtcaaaacggctttgtctcttgaggcggagcactattccgtttactcgctgatcgtagagccgaaaacggtgttttataatttaatgcaaaaaggccgcctgcatctccccgcgcaagaacaagaggccgagatgtatgaaacagtcatgaggcagatgagtgaagcgggcatccgtcaatacgagatcagtaactttgcaaagcccggatacgagtcgcagcataatctgacgtattggagcaatgaagagtatttcggttttggcgcaggcgctcacggatatatcagcggcacgcgcaccgtcaacgccgggcctgtgaaacattacatgcagctcatcgaagaaaaggggctgccttaccgtgacacgcacgaggtgacacgtgaggagcagattgaagaagaaatgttcctcggtctcagaaaaatgtccggcgtacaaaagcaagcttttctcgataaattcggacgctcggtcgacgaactgtttcccgatgttctcaaagatttaaccgaaaaaggcctgatctgtgacacggaagaatcggttgcattaacgcatgagggcaaattattaggaaatgaggtttttggcgcttttttgggtgagttataattgacatttttcttttggtttgttacttttgatatagaattagcactcgctgaccttgagtgctaacaggggtgatgatgatgttaacaaatcgtcagctgttgatcctgcaagtgattattaatgattttatacaatcagcgcagcctgtaggatcaagaactctttcaaaaaaagacgagattacattcagctctgcaacgatcagaaacgagatggctgacttggaggaattgggctttattgaaaaaacccattcatcctcaggacggattccgtcggaaaaagggtacaggtattatgtcgatcatttgctgtcacccgtcaagctgacaaaaaccgatctggatttaattcactcgatatttaaagaaaaaatcttcgagctggaaaaaacagtccaaaaatcagcgcaaatcctgtccgacctgacaaactacacatcgattgtcctcgggccgacgctgagcgagaactatcttaaacagattcaaatcgtaccgatccagccggataaggcggtcgccatcctcgtcacgaacacggggcatgtcgaaaaccgcaccatcaatttcccggctaaagtggatttggccgatattgaaaaactggtcaatatactaaacgatcgattggcgggcgtgccgatggacgaactgaatgagcgcattttcaaagaggttgtcacatatttaaggcagcatatcgccaactatgacagcatacttgaatcgctccgctccacattccatccggcggcccacgttgagaaattgtttttcggcggaaagatcaacatgctgaatcagccggagttccatgatattgaaagggtccgctcgctcttatctttaattgaaaaagagcaggatgttctgaagctgtttcagtcatcaaaagccgggatttcaatcaaaatcgggaaagaaaacgactacgaagaaatggaaaactgcagcttaatcacggccacctatacagttgatacgaagcagatcggatcaatcgccattatcgggccgacgcgtatgaattattcaagagtcgtcagcctgctgcagcacgtgacttcggacttgtcaaaagcattcacaagtttgtatgatgaataagggaattttggcaatcattttcagtcatctttttacagcatttgagggaggtgaacacaatgtcagaagaaaaacaaaccgcagaacaggttgaagcagcagaacaagaagaagtgacagaacaggcagaacaagccgcttcacaagagcagcatgaagaaacggcaggtcaggaagaagcccttcagcaccaaattgatgaattgcagggtttgcttgatgaaaaagaaaacaagcttttgcgtgttcaagcagactttgaaaactataaacgacgcagccgccttgaaatggaagctgctcagaaataccgttctcaaaacgtcgtaacggaaatccttccggcgctcgacaactttgaacgggcgttacaggtagaagctgaaagcgagcagacaaaaagcttgctgcaaggtatggaaatggtccgccgccagctgatggacgcacttgaaaaagaaggcgttgaagccatcgaagctgtcggtcaggaatttgatccgaaccttcaccaagccgtcatgcaggtggaagatgaaaacttcggcagcaatattgttatcgaagaactgcaaaaaggctacaaactgaaggatcgcgtcattcgtccttcaatggtaaaagtgaatcaataactacatagcaggaggtaattcaaagtgagtaaagtaatcggaattgacttgggtacgacaaactcatgtgtggcagtgcttgaaggcggagagcctacagtcatcgccaacgctgaaggaaaccgtacgactccgtcagtcgttgcatttaaaaacggcgagcgccaagtaggggaagtggcaaaacgccaatccatcacaaaccctaacacaatcatgtctgtcaaacgccatatgggtactgactataaagtggaaatcgaaggaaaagactacacgcctcaagaggtgtcagctattatccttcagcatctgaaagcatatgctgaaagctacctcggcgaaacagtttcaaaagccgttatcacggttcctgcatacttcaacgatgcagagcgccaagcgacaaaagatgccggtaaaatcgccggtcttgaagtagagcgtattatcaacgagccgactgcagcagcgcttgcatacggacttgataaaacggacgaagaccaaacaattcttgtttacgaccttggcggcggtacgtttgacgtatctgttcttgaacttggcgacggcgtgtttgaagtccgttcaactgccggtgacaaccgtcttggcggagacgactttgaccaagtcatcatcgatcacctcgtagcagaattcaaaaaagaaaacggcattgatctttcaaaagacaaaatggcgcttcagcgtttgaaagatgcggctgagaaagcgaaaaaagatctttccggcgtttcatctacacaaatttctttaccatttatcacagcgggagaagcaggtcctcttcaccttgagctgacactgacccgcgctaaattcgaagagctttccgctcaccttgttgagcgcacaatggctcctgtccgtcaggctcttcaagatgcggatctttctgcgagcgaaatcgacaaagttatccttgtcggcggatcaacacgtattccagccgtacaggaagcaatcaaaaaagaaacgggtaaagaagcgcataaaggcgtaaaccctgatgaagttgtagcgctgggtgcagcgattcaaggcggcgtcatcacgggagacgtaaaagacgttgttcttcttgacgttacaccgctttctctcggtattgaaacaatgggcggcgtgttcacaaaactgatcgatcgcaacacgacaattccgacgagcaagtctcaagtattctcaactgcagctgacaaccaaacggctgttgacattcacgtgcttcaaggtgagcgcccgatgtctgccgacaacaaaacgctcggccgcttccagcttactgatatcccgcctgcaccgcgcggcgtaccgcaaatcgaagtttctttcgatattgacaaaaacggtatcgtaaacgtaagagcgaaagacttaggcacaggaaaagaacaaaacattacaatcaaatcttcttcaggtctttctgatgatgagatcgaacgcatggtaaaagaagcggaagaaaacgctgacgctgatgcgaagagaaaagaagaaatcgaagtccgcaacgaagctgaccagcttgtgttccaaacggaaaaaacattaaaagatctggaaggcaaagtggacgaagagcaagtgaaaaaagcaaacgacgcgaaagacgcgctgaaagccgctatcgagaaaaacgaaattgaagacatcaaagcgaaaaaagatgagcttcaaacaatcgttcaagagctttctatgaagctttacgaagaagcggcgaaagcgcagcaggctgaaggcggagcaaacgctgaaggcaaaaaagcggatgacaacgttgtcgatgcggagtacgaagaagtaaaagacgacgaaacgaaaaaataagttctttcccgcttggctataggcggaagaacacacagcatattctgattcaacagacagaaagtcaaagtcaggcatctcttggctttgactttttttcttgcccgggataaaaggaattgaaaaaacataattcaaaatgatacaatctaatttatgtgagaaattcgggagagtgaagcgagatgagtaagcgtgattactatgaagtgcttggggtaagtaagagcgcttcaaaggatgaaatcaaaaaagcctatcggaagctttcaaaaaaatatcatcctgatatcaataaagaatccggagcagatgaaaaattcaaagaggtaaaagaagcgtacgaagcgctctcagacgaccaaaaacgcgctcaatatgaccaattcggccatacagaccctaaccagggattcggcggcggtttcggaggcggcggagacttcggcggcttcggtttcgatgacatcttctcaagcatcttcggaggcggcacgagacgccgtgacccgaatgcgccgcggcaaggcgcggatctgcagtatacaatgaccctgtcatttgaagacgcggctttcggaaaagaaacgatcattgaaattccgcgcgaagagaattgcgaaacatgtaaagggtctggcgcgaagccgggaacaaagccggatacgtgctcgcactgcggaggttctggccagctgaacgtcgaacagaacacgccgtttggcaaagtggttaaccgaagagtctgccaccactgtgaaggaacaggaaaaatcatcaaaaacaagtgttctgactgcggcggcacgggcaaagtgaaaaaacggaaaaaaatcaatgtcacgattcctgccggtgtggatgacggacagcagctgcgcgttccgggccaaggtgaaccgggcgtaaacggagggccttcgggagatctgtttgtcgtattccatgtgcgcgcccacgagttctttgagcgcgacggagacgatatttattgcgaaatgccgttaacgtttgcccaagcggcactcggagacgaagtggaagtgccgacgcttcacggaaaagtgaaattgaaaatacctgccggcacacaaacaggcacgaaattcagattaagaggcaaaggcgttcagaacgtccggggctacggacaaggcgaccagcacattgtcgtccgcgtcgtcacaccgacgaatctgacagacaaacaaaaagacatcatccgcgagttcgctgaagtcagcggaaatctgccggatgaacaagaaatgagtttctttgacaaagtaaaacgcgcatttaaaggcgagtaatgattggataggagttggtagttttgaaatggtccgaaatcagcattcacacaacacatgaagcggttgaacccatctcaaatattttgcatgaagctggtgcgagcggggttgtcatcgaagatccgcttgatttaatgaaagagcgtgagaatgtttacggggaaatctaccagctcgaccccaatgattaccccgatgagggtgtcattgtcaaagcgtatctgccgatcaacagtttcctcggcgaaacggtagacggcataaaagagacgattaataatctgcttttgtatgacattgatttgggcagaaacacaatcaccatttctgaagttaatgaagaagaatgggcgacagcttggaaaaagtattatcatcctgtgaaaatttctgaaaagttcacgatcgttcccacatgggaaacgtacacacctgttcatacagatgaactgattatcgaaatggatccgggtatggcattcggtacgggaacgcatccgacaaccgttctgtgcattcaggcgcttgagcgtatcgttcaaaaaggcgaccgtgtcattgatgtcggcaccggttcaggaattttaagcatcgcggccgccatgcttgaggccgaatcggttcatgcgtatgaccttgatccggtcgctgttgaaagcgcgcgtctgaatgtgaaattgaacaaagtgagtgatacggccgaagtgaagcagaacaatttgttagacggcatcacgggcgaacatgatgtcattgtcgcaaatattttggcggaagtgattctccgctttacatcacaggcgtacgacctgctcaaagacggaggccattttattacttcaggcattatcggccagaaaaaacaggaagtaaaagaagcgttggaaaaagccggctttaccatcatagaaattctgtctatggaagattgggtcagcatcatcgcgaaaaaataacagttagtaggtgtcacagcgtatgcaacgatattttatcgagctcacgaagcaggagatggacgaaactcctgattttcaaatcacgggggaagacgtccaccatatagcgaacgtcatgagaatgagtgcgggagaccggattatctgctgttcgaaagacggccatgaagctttatgcctgcttaaagaggtttctaaagatcatatatcatgcagcattgctgaatggacgggtgaaaaccgtgaactgcctttgaagatcaggatcgccagcggcctcccgaaaggcgataagcttgaatggattatccaaaaagggaccgagctgggggcaagtatgttcatcccttttcagggcgccagatccgtcgttaagctagacgacaaaaaggcaaagaaaaagcgggagagatgggcgaaaatcgcgaaggaagcggcggagcaatcgtaccgcaatgaaattcccgaagtgaaaaccgttcatacgttccggcagctgcttgaaatggcggagaatgtcgataaatgtgtcgttgcatacgaggagtcatcaaagcagggagaaacgggcgctttcgctgcggagctcaaaagccttccgcaaggttcgtctcttttaatcgtattcggccctgaaggcggtctgactgagtctgaagttcatcagctttcagaaaaaggcgccgtcttatgcggcctcggaccgagaattttacggactgaaactgcgcctctttacgcgttaagcgcagtttcctatcatacagagttattaagaggtgatcagtaatggcaactgttgcttttcatacccttggctgcaaggtcaaccattatgaaacagaagcaatctggcagctgtttaaagatgcgggttatgaacgaaaagaattcgaacagacagcagatgtatatgtcattaatacatgtacggtaacaaacacgggagataaaaaaagccgtcaagtcatcagacgggcgatccgccaaaatcctgacggcgtcatctgcgtaacagggtgctatgcgcaaacctctccggcggaaattatggccatcccgggtgttgacatcgtcgtcggcacgcaggatcgtgaaaaaatgctcggttacattgagcagtacagggaagagcgtcagccgatcaacggcgtcggcaatattatgaaagcacgcgtgtttgaagagctggatgttcccgcttttactgaccgcacaagagcgtcgttaaaaatccaagagggctgcaacaacttctgtacgttctgcattatcccttgggcgcgcggcctgcttcgttcccgcgatccggaagaagtcattaaacaggcgcagcagctggtggatgccggctataaagaaatcgtcctgacggggattcatacgggcggctacggcgaagatatgaaagattataatttcgccaagcttctccgcgagcttgatacacgtgtagaaggactgaagcggatcagaatttcatctattgaagcaagccaaatcactgatgaagtgattgaagtgctggatgcgtctgataaaatcgtccgtcaccttcatatcccgattcagtcaggatcaaacaccgttctgaaacggatgagacgcaaatatacgatggaatttttcgcagaccgtttaaataagctgaaagaagcgctgccgggtcttgccgtcacatctgatgtcatcgtcggtttcccgggagaaacggaagaagaatttatggaaacataccggttcattaaagaacataagttttcagagcttcacgtattcccttacagcaaacgcaccggaacacctgcggccagaatggaagaccaggttgacgagaacgtgaaaaacgaacgggtgcataagctgatcgcgctgtctgaccagcttgcaaaagaatacgcctccgattatgaaggagaggttctggaaatcattccggaagaggcgtttaaagagtctgatgaggagggcatgttcgtcggctatacggacaattacatgaaagtcgtcttcaaaggcacggaagatgtaatcggcaaacttgtcaaagtcaaaattcaaaaagcgggctatccgtataacgaaggacaattcgtccgcgtcgttgaggatgaaatgacccgaaacatgcgcatgtcttcataactgataaaaaaaccggtgccttcccgcatcggtttttttacggtttcggaggaatcagcctgtcaatcagccggtaaaacaaatgtgtgaacggcagaaacaataaggcggtgactacgttaaataacaggctgaaatgcgcaatcatctgcgcgggatcatcagacaggcgctccgtaaaacctgctgatgcggacaggaagggaaatacgagcagcacgccgagaatattaaacacaacgtgagcaccggcggtctgtctggcggcataaccgcctgaaacagcagccatgacggccgtgacgcatgtcccgatattagatcccagaacgacgctgaccgcttgttcaatgccgatcaccccttcgttcataaaactcatcaaaatgccgatgcagacggagcttgaatgaatgattgccgtcaatatcatgccgataaaaagagcggaccagctcgaatcattcacatgtcgcaaaacctccgcccccgccttcatttctgtcagcggaacggcgagccggctgaagcatgtgatgcaaaaaaagatgatgccgagaccgaggaagcttatgccgatctgcctgaacggatatttacggaggaggataaacacaaggcctccgataaaaagcacccaaatgagcacatccatctttatggctaaaaactccgtcgtaaacgtggagccgacattcgtgccgagaatcatcggaatggtccgtttaaaagataaagcgcctgcgctgacaaagccgatgacaatgaccatgaaggctgagctgctctgaagaaaaccagtgaatacgatgcttatgagaaaagctttcaaagggtggtcggtaaataagagcaggctcttctcaatttttgaatacgttaaggcgatcagcccctgcctgagcaggctcattccgagtaaaaaaatcaggataagtgcggtaaagagaatcagtatcatcaaatgaaacacccctttccatcattatatagacaagcagctttattcatgacggaaaagtgagctcgcttagttgacctgactgatggcttatattataatgtcaaagtacatgtttatatatgtatctttttaaaggtagtcgattggtgtattcggagggagggaaagagaatgtcaaaaacggtcgttagaaaaaacgaatcgcttgaagatgctcttcgtcgcttcaaacgcagtgtatcaaagacaggtactttgcaagaagcaagaaagcgcgaattttatgaaaaacctagcgtaaagcgcaagaaaaagtcagaagctgctagaaaacgcaaattctaaaagagggtggatttatgagtcttcttgagcgacttaaccaagatatgaagctgtatatgaaaagccgtgagaaagacaaactgactgtcgttcgaatggtgaaagcttcacttcaaaacgaagcaattaagcttaagaaagacagtttgaccgaggatgaggaacttactgtcctatctcgtgaacttaagcaacgtaaagactccctccatgaattttcaaacgctaatcgtttagatttagtagataaagttcaaaaagagctggacattttagaagtttatttaccgaagcagctttctgaagaagagctgcagacaatcgtaaatgaaaccatcgctgaagtcggtgcgagctccaaagcggacatgggcaaagtgatgagtgctattatgcctaaagtaaaaggtaaagctgacggcagcgtaattaacagacttgtcagcagtcaattatcttaattgacaagaaaaaagacatctttccttgagagatgtctttttttatacataaaaaaatgaaactaaagtacatttgttacgtatataaagaagaacgaaacgggaaggagggtatatttgccttgttccgaaaaaaaaccggaattgctgttgctctattgggcttatttgtattatctttattaggggttcaattgaacgcgaaagctgatcatccatcggtttatgtcatcccggttgagaaaaatgtcgaacaggggctcgcctcgtttttatcgcgttctttcaaagaagcgaaggagtccggcgcgtcacacattattcttgacatcaacacaccgggaggcgccgttcaatcagccttggatattgctgatatcatcggccgcgcggatgtgcctgttaccgcttacgttaataaacgggcgctttctgccggagcgtatatagcgcttcaggcagatgaaatctatatggcgccgggcggaaaaatgggtgccgcagccatcatcgacggaaagggaaacgcggcagacaaaaaggcccaatcactgtggcatgcagaaatggaggacgcagcggttaaaaacaaccgaaatccgaaatacgccctggccatggcagatcccgccattaatgcaaaggaagcgggcgccccaaagggaaaactgctgacactgatcgctgaaaaagccaaggaagtcggatattcggagggcacggtttcagaccttgatgctttatatacaaagctcggttttgacaaagcggatgttcaccatgcaaaagaaggtttcgtcggcaaactgggcagatggctgacaaatccgtttgttgtccccgtcttattaacgcttgctttgcttggtttgaccattgaattgttctcgccgggcctcgggataccgggtgccgtcggactgacggccatgctgctgtttttcaccgggcatatcgctgccggattcgccggctatgacagcgtattcttattttgcgcgggcttggtttttatccttttagagatatttctgcccggaggcataatcggtcttatcggtattgcaggcgtcatcgcgagcctctttctcgctgcgggcagctttaccgtaatggcggtttctctcttgatcgccattgctgtgtctattacagcctttatcatattaacaagggtgttggggaaacgaatgaaattctttaaaaaattaatattaactgattcaacaagcacggagagcggttatgtttcaaatcagaaccggacggagctgttgggaaaagtcggcgttaccgctacagccctcagaccgtcaggcaccgtcattattgatgatgaacgtctggatgtcgtctcggaaggatcattcactgaaaaagacagacaggtgaaagtagtgaaagcggaaggctcacgcattgtcgtgagagaaatatagatgataaccttgaggaggaattagatggaactgtcaagtttggcgattttagcattagttgctgctgccattattgtgttagccatattctttacctttgtaccggtgatgctatggatttcggcgcttgcggcaggagtcagaatcagcattttcactttggtcgggatgaggctgcggcgcgtcataccaagccgcgttgtcaatccgttaattaaagcgcacaaagccggcctgtccgcaacaacaaatcagctcgaaagccattatctggccggaggtaatgtcgacagggtggtcaatgccctgattgcggcacagcgcgccaatattgaactgtcatttgaacgctgcgcagccattgacctggccgggcgtgacgtattggaagccgtacagatgagcgttaatccgaaggtcattgaaacaccgtttatcgcgggtgtcgccatggacggaattgaagtaaaagcaaaagccagaatcacagtaagagccaatattgagcgccttgtcggaggagcgggagaagagacggttgtcgcccgtgtcggagaagggattgtctcgacaatcggttcttcacacaatcataaaaaagtgcttgaaaaccctgatatgatttcacagaccgtacttggcaaagggctggattcaggcaccgcatttgaaattctttcgattgacatcgccgacgttgatatcggcaaaaacattggagcgattcttcagacggatcaggcagaagcagacaaaaacattgcgcaggccaaagccgaagagcgccgcgccatggcggtcgcccaagagcaggaaatgcgcgctcgcgtagaagaaatgcgtgcaaaagtcgtggaagcagaagccgaagtgccgcttgcgatggcagaagcgttgcgtgaaggaaacatcggcgtcatggactatatgaacataaaaaatatcgacgcggatacggacatgagggattctatcggcaagctgacgaatgaccagcaagatgaagaccaacaataacctctctattaaggagggagccgctatatgcacgagattctgacaaatccgctcgtcattgccgccgtcatcggcattatatcggcaatattcggcaagaaaaacaaagatgaaaaacgtccgccgggtacacgtcccggaaatcaggcaaaaaagcaggatcaaaaacagccgcagaaagagcataagccggaagcggaagaattgcctgccgtttcagaagagaacccttttgagcaaaaaagaagggaagctgaaaagcgcctagcgaagacggagcagatgtttaacgggctcgaacataagctgacatccgcacgcgcacgaaacgcgtctctgaagaaatcagccctcaaaataaataaagaaactgcggtccaaggcattatattcagtgaggttttgggtccgccccgtgcaaaaaaaccgcaccggaccatgcggaacatcggtaaaaaataaagtgttagaaccccttttcaaatcatacatatgagatgaaagggggttctttttttatggggcaaagaaagaatcgtgtaaaggcatggctgacaagagcattggaaattcccccggacgttatgatggatctgcctcgtattacgatggtcggcagacttcatatctacatagagaatcacagaggcctcctgctgttcagtgaagaagaagtcaggctgatgctcaagcagggtcagtgtatcatatcaggaaaaaacttggtcattaaggcaatccttcctgaggaaatccttttggaaggcacgatagatcacgtacgatatgtcgattcataaagccggggggaaataatgtgaaaaacaaatggctgtcatttttttcgggtaaagtccaaatggaagtcaaaggaaaagggattgaacggctgctgaatgaatgcacgagaaacggaatcgccatctttgcggtgaaaaaaaagcaagactgtgttctgctgatgattcagcttcaagatgtacatgctttcagaagagtcatcagaaaacatgaatgcaaagcaagctttacaaaaagaaagggtcttccctttctgcttctcaaatcaagattaaacctgggcttcactgcagggtttttgatattttttgttatattgtttcttttgtccaacatgatttgggaaattgatattaaaggggccaagccagaaaccgagcatcagatggtaaagcaccttgaagaaatcggtgtgaaaaaaggccgtttgcaatttttaatgatgacgccggaaaaaattcaaaaatcattaacaaacggcatcgataatattacgtgggtcggtgtggaattgaacgggacagcccttcatatgaaagtggtcgaaaagaacgaaccgacaaaagaaaagtacgtgagcccccgtcatatcgttgccaaaaagaaggcggtcatcaaaaggatgttcgtgcaaaaggggcagccgatggcttttgtgaacgatcatgttgacaaaggacagctcctcgtctcaggactgatcggaaatgaagaccggaaagtcgcctcaaaagcggaaatttacggagaaacatggtacaagtcagaagtaaccgtgccccttgaaacatcatttacgctatatacgggtaaagtaaggacgaagcacaagctgtctttcggatcatggggcgtgcctttttggggctttgaatttaatgagaagccgctgaaacatccgaaaacagaggaagaaaagcatccgtttcaatttctggggatgaagcttccggtttcttacgtttcagaacagacaagagaaagtgaaacatccgtgcggacttatacgaaaggcgaagcggttcaggccggtatcaaaatgggaagacaagatgtagaaaagcgattaaacggcagcggagaggtggaaagtgaaaaagttttgcaccaatccgttgagaatggtaaagtaaagttgattattctctaccaagttatagaagatatcgttcaaaccacacctattgttcagggagactaaagaatggcagaacatttacttgcgattaatcacaaactgaaaagcccggacgaagcactttctttgttcggcagccaagatgcttttttacatttaatggagaaggatctgggcattagcctcatcacacgcggtgaaaccatttacgtttccgggaatgatgaaacatttgagatcgctgacagattattgggctcgctccttactttaattcgcaaggggatcgagatttcggaacgtgatgtgctgtatgccgtaaaaatggcaaaaaaagatgaactggactattttgaaagcatgtatgaagaggaaataacgaaaacggcaaaaggcaaaccgatccgtgtcaaaaccatcggccaaagagaatatgtggcggcgatgaagaaaaacgacatggtgttcggcatcgggccggcgggaaccggcaaaacttatttggcggtcgtaaaagcggtgcatgctttaaaaaacggccacattaaaaaaatcattttaacaagacccgctgtggaagccggcgagagcctcggttttctgcccggagatttaaaggaaaaagtagatccttatctgcgcccgctgtatgacgcgctccatgatgtgctcggaagcgaccatacggagcgtcttatggaaagaggggttatcgaaatcgccccgcttgcctatatgagagggcggacgcttgacgacgcgtatgtgattcttgatgaagcccagaataccactcccgctcaaatgaaaatgtttttgacgagattgggttttggctctaaaatgatcattacgggcgacgtaagccaaattgacctgccgaaaggcgtcacatcgggacttgcagtggcgaaggatatgctgaaggacgtaaacggcatctccgtgattgaacttgaccagacagatgtggtcaggcatccgcttgttgcaaaaattattgaagcttatgataagcaaaagtaatgcaaaaatgacccgatctcccgttatcgggtcatttttatatgatgtgttcctgatgtttcagggaggaggttcttgttttgaaaaagaagggaaagggcaaaagcgcccgggaacggttccgcagtttcagacatgcccgctcagcccatgtgctgctgtacctgctgctttcagcgatcatgtttggtttgctctttattcatgtaaaacctgaatcacttaatttggatttgtttgcagtcagtgataagacgatttacgcgcccgccacagtggaagatcagcaggcgacggaatcgaaaaaacaggcggccgaagatgcggtggaagatcaatacactctgaaaaaaggctataccgacaatcggcttgacctgatcacttccatttttgacagcatcggcgaagtgaaaaaagatgcggaaaaagacaaaaagtcaccttcggaaaaatcactggtaaaatcggtgaaaaacaagctgacacaggatgtcaatgaatccgtctcggaagatgccattaaatcgcttctccatgcaaacaatgaagatttctcatttgtgagggattccgtcattaccgcggtgaatacggtgatgagcagtgaaattccttctgaaaagcttgctgaagcgaaggataaggtcgcaaaagagctgaaaagtgcttctgtgccgtcaaaatatttagcggctgcgactgaaatcggaaaatacgcggtcatcccgaattacgtttttgatccgaaagcgaccgatgaaaaacgccaggaagcgtcagacagcgtccagccggtacagatcaaacagggacaggttctcgtggaagagaatgatctgattgaccgggaagtatacaggaagcttgaactgacgggtcttttgaataattccaacctgttaaaaccgatcagcggtcttcttctgatgatcggcctgtttattgccacgcttgtctactattttgagaaacagcagcaggagcttaagctgaaaaataaatctcttttgctgttttctatcattacaacgcttattctcgtcattatggaagtcgtcagtctctttcagaagattgaatacaccaatatcggctatcttgtgccgatcgccgccggcgcgattttaatcaggctgctgctcaatgaaaggctcgccattttaggaagcatcattctggcgatctgcggcagtatgatgtttaatcagggtgtgacgggaacatttaattacgtcatcggcatttactatttaatcagcagcatttcaggcattctgtttttgggaaaacataatgcgaggtcaaaaatattgcagacgggactgttcgtctcatttattaatatgattatcgtgctgtcgcttttattaatacaaaatacggcgctgtcaccggttgaaatcggaacgctgatgctgatgggggtcgtctcgggacttgcttcatccgttttgattatcggtctgatgccgttttttgagacgggattcggcattctttcaacaatgaggctgattgaactgtctaatccgaatcatcccctgcttcgaaagattttaacggaaacacccggtacatatcatcacagcgtcatggtggcaaatctgtcggaagcggcttgtgaagccgtaggggcaaacggtcttttagcacgggtcggagcgtattatcacgatctcggcaaaacgaaacgtccgcaatattttattgaaaatcagatgaatatggataatccgcatgacaagctgtctcctcagctcagcaaaaatatcattatcgcacatacgacagacggtgcgaatatgctcagaagctataagtttccgaaagagcttgtggatatcgcggagcagcatcacggaacgtcccttttaaaattcttttattataaagcgaaagaaaagggcgaccagattacagagaaagagttccgctacccggggccgaagccgcaatcgaaagaagcggctattatctcagtggccgacagcgttgaagccgccgtccgttccatgcataatcccaatcccgagcggatcgaaaaactggtgcggggaattatatccgataagcttcaggacggacaattctcagaatgtgatctcacgttccgagaactggatacgatcgcaaaaacactatgtgcgactttaaaaggaattttccactcccggattgaatatccggaggctacgaagaaggtgaaataaatgagtttactcatagatattgttgatgaaacgaacagcgtctcagctgatgcgctccaagaagtggagaagctgctccaattcgcggcggaaaaagaaggcgttcaggaccaggctgaagtatcggtcacgattgtgacaaatgaggaaatcagagaaatcaacagagactaccggggaaaagacactccgactgacgtcatttcgtttgcgcttgaagaagaaggcgaagacgaggttgaaatcgtaggcgccgacatgccgcctgttttaggagatattatcatcagcgcagacagaacgaaagagcaggcggaagagtacggccattcgtttatgagagagctcggttttctggccgtgcacggctttttgcatttgcttggctatgatcacatgacaaaagaagaagaggaagaaatgttttcaaagcaaaaggatttgctggatgagtatggactcacgagatcataaaaacgagtggagcaggttcctgaagagctttgtccatgcatggaggggaatctggaaaacggcgcggtcagagcggaattttcaatttcatattaccgcggcctgcgccgttatcgtttgcggttttctcaccgggctgagcacagccgaatgggccattgttttggtgctgatcggagggatgcttgctttggagcttttaaatacggcgatagagcatgttgtggatttagttaccgatcagtatcacccgctcgcaaaagcggcaaaggacgcggccgccggagccgtttgcgtctttgccgtgatatcgtgtatcattggtttactcatcttcttgccgaagatatgttagcagaagattcttacaattattttacattgccaaaaatgggcgtgaaaaaccaatcgtaattatgtaaaataaaagtgacagcggtatcatacaggataaaggtaagagaggaattaagtacacatgaacagacaagaattgattgcagaagcattaaaagcgcgggacacagcgtatgtgccgtattcaaatttcagagtgggagccgctcttcttaccaaagacggaaaagtgtacagaggctgcaacatcgaaaatgcggcatacagcatgtgcaactgtgctgaacgcacggcgatattcaaagctgtttccgagggggatacggaatttgcgatgctcgccgtggctgcggatactccgggaccggtttcgccgtgcggagcctgcagacaagtaatttccgagctgtgctcaaaggatatgcttgttattctgaccaacttacaaggacaaataaaagaaatgactgcggaagaattattaccgggcgcattttcatcggaggatttacatgacgaacgaaagctttaaatcaggatttgtatctatcatcggaaggccgaatgtaggaaagtctacctttttaaacagggtcatcggtcaaaagatcgccatcatgagcgacaaaccccagacgacaagaaataaagtccaaggggtgctgacaaccggcacgtcgcagaccatttttattgatacaccgggcattcacaaaccaaagcacaagcttggcgactttatgatgaaagtggcgcagaatacgctgaaagaagttgacttggtgttatttatgattaacgccgaagaagggtacggaaaaggcgacgagtttatcattgaaaagctcggacagacgtctacaccggtctttctgatcgttaacaaaattgataagatccaccctgaccagctgcttcttttaattgatgagtaccgtacgcgctatccgtttaaagaaatcgtgccgatctcagctttggaagggaacaacgtcgaaacccttctcgcgcagattgaagcgtatttaccggaagggcctcagttctatccgagcgatcaggtgactgaccaccccgagcggttcattatttctgaactgatcagagaaaaggtgctccatctgacaagggaagaagtgccgcacagcatcgctgtcgccatcgagtccattaaagggcaggaaaacggctccgtccatgtcgccgccaccattgtggtcgagcgggattctcaaaaaggcatcgtcatcggtaaaaaaggagcgcttctgaaagaagtcggcaaaagagcgcgggctgatattgaagctcttttgggctcacgcgtttacctggaattatgggtgaaggtgcagaaggactggcggaataaaatgtctcagctgcgtgatttcggcttcaaagaggatgaatattaattcatctaaggcgcatgtctgaggtgtgagattacctcacagaagcagggattcgttagcaaaatttgtttaacatgaaaaggaggacatcaggtcaagataagggtaagaatttggatttgcaagctagtttaatgacgaaaggtgggttttttgtgttgaattttacctggaacgtattttctcaaacaggaagtgttgatacgtaccttctttttaaagaactggaaaaagagaacctggaaagacccgaagaaccggaagatgagctagcccgaattgattttccaattttgtaaacctcttggcccctcccattgttggaaggtgcggaaatgctgactaaatgtgaaggaatcgtgctccgtacgaatgactacggggagacgaataaaatcgtgacattgctgacgagggaacacggcaaaatcggcgtcatggcaaggggcgccaggaagtcagccagccggctgtcagcagtcagccagccgtttttgtacgggtcatttttaatgcaaagaacatccggactcggcacgctccagcagggtgaaatgattctcagcatgagaacgatcagagaagatttatttttgacggcgtatgccgcttttatcgctgaactcactgacaaaggaacggaagagaagaaaccgaacccctatttattcgaattgattctcgaatcctttaagaggctgaatgacgggactgacccggacgtgatcaccttcatcgtgcagatgaaaatgctcggcgtcatggggctgtatccggagctgaatcattgtgtccactgcaaaagcggggaagggacgtttcatttttcgataagagataacgggtttatctgccaccgctgctttgaaaaggatccgtacagagttccgatgtcgccgcaaacggcaaggctgctaaggcttttttattactttgatatcggaaggctcggcagcgtctcgttaaaacaggaaaccaaaaacgaaattaaacgggtcattgatctgtattacgaggaatattcaggactttatttaaagtcaaaacggtttttagatcagatggaaagcatgaagaaccttttggatgaaaacaaaagttgacattctgcccatctttttatatgatcatttattataaaatatgttgcagtgacagaaagaagtacttgcgtccaactcatacaagcgaccttagggcagtgtaagctaaggatgagcgcgcaacgaaaggcattctcgagcaaccctttaaaaagaggctgagtgattcacatcctcagcaactagggtggaaccgcgggagaactctcgtccctatgtttgcggccggcaagcatagagacgggagttttttggttgccgccgcacttgtaaaagaatggagaaagtggaggtgcttgaaatgaacattcaagatatgattttaaccttgcagaagcactggtcgaatgaaggctgtgtgctcatgcagtcgtatgatgtggagaaaggcgcaggcacaatgagcccgtatacatttttacgaagcatcgggccggaaccgtggagagtggcttacgttgagccgtccagacggcctgcggacggacggtacggtgaaaacccgaacaggctctatcagcatcatcaattccaagtcattatcaagccgtcgcctgataacattcaagagctttaccttgattcattgcgtgcgctcggcattgacccgcttgaacatgatatccgtttcgtagaagacaactgggaaaacccgtctttaggctgtgcaggtctcggctgggaagtatggcttgacgggatggaaattactcagtttacatacttccagcaggtgggcggaattgaatgtaaaccggtatccgttgagatcacatatggtattgaacgtctcgcgtcatatattcaggataaagaaaacgtctttgatcttgaatggacgtcaggatttactgtgaaagatttatttatgatggctgaatatgagcattccgtttatacttttgaaacatctgacgtggatatgcttttccatttgttcagcacctatgaaaaagaagcgatcagacaaatggataacgggctcgtgcatccggcctatgattatgtgctgaaatgctctcacacatttaatctgctcgatgcaaaaggcgcgatctcggtgacggagcggacgggttatatcggccgtgtccgcaacttagcgagaaaagtggcaaaaacgtattatgaagaacgggaaaaattagggttcccaatgcttaaagaggagggctcttcccatgagtaaacaagacttgcttttagagatcggactcgaggaaatgccggcgcggtttttacatgacagcatggtgcagctcggtgaaaagctgaccggctggctggctgaaaaaaatatcgcccatggcgaagtgaaactttttaatacgccgagacgtctggcagtatatataaaagacgtagcagaaaaacaggctgatattcaggaagaagcaaaaggccctgcgaaaaaaatcgctctggatgctgacggaaactggacaaaagccgctatcggattttcaaaaggccaaggcgccggagtggatgacctgtatataaaagatgtaaacggcacggaatatgtcttcgttcaaaaattccaggcgggacaagagacgaagacacttttaccgcagctggaaaatttgattgccggaatgcatttcccgaaaaacatgcgctggggcacgcaggatctgcgctatatccgtccgatcaaatggattatcgctctctttggaaaagacgtcattccgtttaaaatcacaaatgtcgagacgggccggaacacacagggacaccgctttctcggccaagaagtatctgttgatgcaccgtcatcatacgaaaagctgctgaaagaacaaagcgtcattgctgacccgaaagaacgcaaacaaatgatccaaagccagctggacgcgcttgcagccgagaagaaatggaacattccgatagatgaggatctgctgaacgaagtcaaccatctggtggaatacccgacggcgctttacggatcttttgaatccgagtttctttctatccctgaagaagtgcttgtaacaacaatgaaagagcatcagcgctacttcccggtaaaagatgaaaacgggaatctgcttcctcattttattacggtaagaaacgggaacagccatgcaattgaaaatgttgcccgcggaaacgagaaagtgctgagagcaaggctttcagatgctgcgttcttctacaaagaagaccaaaagctgaacattgatgaaaatgtgaagaaactggaaaatatcgttttccatgaagagctcggctcccttggagataaagtaagaagagtgaccgccattgcgggcaaacttgccgtccgcctgaaagcggatgaacagacgcaaaaacttgtgaagcgcgccgcagagatttctaaatttgacctggttacacatatgatctatgagttcccagagcttcaaggcgtgatgggagaaaaatatgcgcgcatgctcggtgaagatgatgccgtcgctgccgctgtcaatgagcactatatgccgagagcggccgggggagaagtgccttcaacctttaccggcgcggtcgtggcgttagctgataaactagacacgattgcttccttcttcagcattgacgtaattccgacaggttctcaggacccgtacggattgcgccgtcaggcaagcggcatcgtttccattctgatcgaccgcaattggggcatttcttttaaagagctgctgtcattgacagaaacggaaaaagaaaatgagctcctcgatttctttacacagcgtctgaaatacgtcttaaacgctgaagacatccgtcatgacgttattgaagccgttctggacagcacagagcttgagccgtatgcagccgttcataaggcaagagtgcttgagaagcacctcggcacacccggctttaaagaaacggctgaatcactcggccgggtcatctccatcagcaaaaaaggcgagagccgcgatatcaatccggatctgtttgaaaatgaacaggagaaaaagctgtttgacgcttatcaaaaaacaaaagacagtgtcgcggaaagctttgcctccaaaaactatgaacaggcgcttgccgtgctcagcggattaaaggagccgattgaagactactttaatcacacgatggtaaatgcggacgatgaagcattaaaaaccaaccgtttagcgcaaatgaccgctcttgcagatgtgatcaagtcttttgctaatatgaatcatcttattgtaaaataaagaaaaagacggttgctgtgtgatcggcaatcgtcttttccccttttacataaacatcacagaatgaaaacatagataaagaaacccttccattaaggtggtgagtacgatcgaattaaataaacggcaagaacaaattttacagattgtaaaggaaaacggcccgattaccggagagcatatcgcagaacagctcaatttaacgagggccacgctgcggccggacttggccatactcaccatgtcaggcttcttagaggcccgtccgcgggtcggttatttttatacggggaaaacgggaaatcagctgcttgcggataaattgaaaaagctgcaagtgaaagattttcaatcgatccctgttgtcatcaatgaaaatgtctcggtatacgatgccatctgcaccatgtttttagaagatgtcggcacgttatttgtcgtagatcgtgatgctgtcttagtcggtgtgctgtcacgcaaagatttgctgcgggcgagcatcggccagcaggaacttgcctcaataccggttcatattatcatgacaagaatgccgaatatcgccgtctgccggcgtgacgattatgtgatggacatcgccaagtatttaattgaaaaacagatcgatgccctgcccgttattaaagatacggataaaggctttgaggtcatcggccggtttaccaaaacgaatatgactaagatacttgtcagtttatcagaaaatgaaatcatataagcttgaaaactaacggggggataacatggacaatcgcatcatttatgtagtatcagactcagtcggagaaaccgccgaactcgttgtaaaagcctcgctcagccagtttaacggctcagccgatgatacgcatatcagaagaataccttatgtggaagatatcggcaccattaatgaagtcgtgtctctcgccaaagcggacggcggcattatttgttttacgctcgttgttcctgaaatgcgcaaatacctggttgaacaagcggaaaaagcgaatgtgctgtattacgatattatcggtccgctcatcgataaaatggaatcggcttacggtctgaccgccaaatatgaaccgggccgcgtccgccagcttgatgaagattatttcaaaaaggtcgaggcgatcgagtttgccgtcaaatatgacgatggcagggatccaagaggcattttaaaagccgatatcatcctgctcggagtatccagaacgtctaaaaccccattatcacaatatcttgcccataagcgtctgaaagtggccaatgtgccgatcgttcctgaggtcgatccgccggaagaactgttcagcgttgatccgaaaaaatgcatcggcttaaaaatcagccctgataaactgaaccatatacgaaaagaacggttaaaatctctcggcttaaatgacaaagccatttacgccaatatcaacagaattaaagaagagctggagtattttgagaaaatcgtggaccggatcggctgccaagtcgttgacgtttcgaataaagcggtcgaggaaacagcgaacatcattcatcatctcaaaacaaagggccgataactcaggacgctttatcctgggtttttgggtatgcaaatagggaataaacaaaaaggatggcatcttcgcgaagtttgtattataataaaaaattgtgataaaatgtttatttttaggtttaagcttcgtgtgatacgaataaactattatgggtaagatgtcaagaataactcccggaaatttttcgacaaagctcaaaatagatccgcagtcatggagcatatgcgatttcgcttgtttttatgcaggagattgatggagggatggagaattagtcttctaaatgaaaaagaaaagacgatttttgtcgatgcagacgcatgccccgtaaaagaggaaataatgctcattgcatcgcaattcagcgttcgggttattttcgtcgcatcatttgaacactaccagctttccagaagcaaagacgagaactgggtatacgttgatcctcataaagaagcggcagacttatatatcgcaaaccatgtgagatcgggagacgtcgtagtcacgcaggatatcggtttagcctctcttttgctgaacagaaatattgccgtcttatcggaaaggggccgttcttatactgaagacacgattgacttcgctctgatgagccgtcatatgtcaggcaaaatgagaagaagcggcattcattccaaaggacctaaaaaattaaataaagaagatcggaatcgatttgttaccctgcttaaaaaaatcctgtcgaatgatgaagggatttcaaatcaaaacatcgaataatgtacgacggagtgttataagatgggaaaccgcataccagatgaagtagttaatcaggtgcagcagtcagcagacattgttgaagtcataggtgattatgtccaattgaaaaagcaaggccgcaactactttgggctctgtccgtttcacggggaaaacacgccctcgttttccgtctccagcgataagcagatctttcattgcttcggatgcggtgcgggcgggaacgttttctctttcttacggcagatggaaggttattcatttacggaagctgtttctcaccttgcggataaatatcagattgatttccctgatgatataacgattcactctgcatccaggccggaatcttccggagagcagaagatggcggaagcccacgagcttctgaagaaattttaccatcatttgctaataaatacaaaggaaggccaggaagcgttagattaccttttatcaaggggttttacgaaagagctcatagatgagtttgaaatcggctacgcgctggattcctgggatttcatgacgaaattcttgaaaaagcgcggttttgaggaagaactgatggaaaaagcgggtctgctgatcagaagggaagacggcagcgggtattttgaccgtttcagaaacagaattatgtttcccattcatgatcaccacggagccgtggcggctttttcaggaagggcgctcggaagccagcagccgaaatatatgaacagcccggaaacgccgctgtttcataaatctaagctgctgtataactttcataaggcgcgcctgccgatcaggaaagaggagagagccgttctgtttgaaggcttcgctgacgtcatatccgccgtcagctcaggcgtaaaagaaagtatcgccacaatggggacgtcgctcaccgaagaacatgtgaaaatcctcagaagaaatgttcaggaggtcattctctgctacgattcggataaagccgggtacgaagctacgctgaaagcggccggcctgctccagaaagccgattgtaaggtaagagtaagcatgctgcctgacggacttgatcctgatgattatatcagaacccggggcggagaaaaattccggaccgatatcattgatgcaagcgttacggtcatggcttttaaaatgcagtatttccgcaaagggaaaaacttatctgacgaaggagaccggctcgcttacatgaaagaagtgctgaaagaaatcagcgctctttccgggtcgcttgagcaggaaatgtatgtgaagcagctcgcctcagaattttctctttcggtagaatctttgacggaacagctttccatctacgccagacaaaacgcccccggcgacaaaaacgccgaaccgcagacaaggcgggcccgggtgacgacaaaagcgaaacggcgccgtctccgtcccgcctatgagaacgcggaaagacttctgctcgctcatatgctgagagaccgaaacgtcataaagaaagtgattgagcgtgtcggctttgaatttaacattgacggacatcgtgcgctggcagcatacctgtacgctgtttatgaagagggcgctgacatgacgccgcagcatcttatggcgagaatgcaggatgaggaaatcagccagctgctttcagatatagggatgctccaagtaaacgaggagctctcagaggccgagttatccgattacgtaaaaaaagtgttggatcaccgaaaatggtcaatgataaaggaaaaagaagcagaaagagcggatgcggagaggcagaaagacttcgtgaaagctgcgtctctggctcaagaaattgttgcattgaaccgatcattaaagtaacaccaaaaagaggcttgcgttctgattggcaatgattccttgcggaggagcaaatagatcgcttaacctcatcatgaattgtcatttattatccgcagccctgcatgctgaaaaagagagaaggcttccgggtcggataagaaacataccgcttttagaattcgttgcaagctttggaaggagggatccataatggctgataaacaaacccacgaaacagaaacagaacttacattagaccaggtaaaagagcagcttactgaaactggaaaaaaacgtggcgttttaacatatgaagaaattgctgaacgcatgtccagctttgaaattgaatcagaccaaatggatgagtattatgaatttttaggagaacaaggtgttgaattaattagtgaaaatgaagaaacggaagatcctaatattcaacagcttgccaaagccgaagaagaatttgaccttaatgacctcagcgtaccgcctggcgtaaagatcaatgatccagtccgcatgtaccttaaggaaatcggacgggtaaatcttctttctgctaaagaagaaatcacctacgctcaaaaaattgaagagggtgacgaggaatctaaacgcagactggctgaagcaaaccttcgtttagttgtcagcattgctaaacggtatgtcggccgcggcatgcttttcttagacttgatccaagaaggaaacatgggtctcatgaaagccgtcgagaagtttgactaccgtaaaggatataaattcagtacgtatgcgacttggtggatcagacaggcgattacacgcgccatcgctgaccaggcgagaacaatccgtatcccggttcacatggtggaaaccatcaacaaattaatccgggtgcagcgtcagcttcttcaggatcttggcagagagccgacaccggaagagattgctgaagacatggatcttacgcctgaaaaagtccgtgaaatattaaaaattgctcaagagcctgtttctttagaaacgccgatcggtgaagaggacgactcacatctcggtgatttcatcgaagaccaggaagcgacatctccgtcggatcatgcggcatatgagcttttaaaagaacagctggaagatgtgctggatacgttgacagatcgtgaagaaaacgtgctgcgtctccgtttcggtctggatgacggacgcacaagaactttggaagaagtaggcaaagtgtttggagtaacgagagagcgtattcgccaaattgaagcaaaagcgcttcgcaaattgagacatccgagcagaagcaaacgtctgaaggattttctcgaatagaatggaacgggtctttttgatccgttcttttttatgtataagatatatggataatatacctttattttactggataagcatatgttttgcaaatgagtttggaaaaaatgcggcatgtcctgaaagggggaaaatgagataagtttatttatattctttattgtaagcgtatacaattcattatacaatagaataaagataattttgtgataaacaaaacagttatttttgctttttgtataaattgtgaaatcaatgaaattgctgagcaagaccatttactttttgtaaaaataagttagaattagaagtgtttacatagggggagaatgaaaaagggggatggagatatgaagtggaatccgctgattccttttttgctcattgcagtgctgggaatagggctgactttctttttagctgtaaaaggcaatggagatgcgcatcagatcgcaagcggcggtgaaagcaaaaatgccgagaaggaaactgcaaacgcttcacctgaagagatttataaagcgaactgcatcacctgtcacggggaaaactatgaaggtgtgtcagggccgaacttaaaaggcgtcggcaaaagaaaagatgtcgctgagattaaaacaaaaattgaaaaaggcggcaacgggatgcccgcaggccttgtgccggccgaaaagctggatgacatggcaaaatgggtttctgacattaaataaagctttaccggtccctatataaaagacatatgaaaaactctatccgccgcttggattccgggcggtttttttatatgatagtaaaggaaaaagaacctgagaaaagttgtgatattgtgaatgaaatgaagttatctaaaagattgcagtctgtggcggaatatatccctccgggtgccctggttgctgatatcgggtcggaccacgcgtatcttccttgctatgccgttttgaatcatttggcaagccgggcaatcgccggtgaaattacagacggaccgtttctatccgccaaacagcaggtggaaaaactggacttaagcactcttatctccgtaaggaaaggtgacgggctgagcgtccttgaaaaaggagaagccggcgccattacaatcgctggcatgggcggagcgctgatcgctcatattttggagtccggaaaaacgaaattgacggggcgtgaacggctgattctgcagccgaatattcatgccgttcatataagagagtggctgtatcaggaaggctatgaactgattgatgaagtgattctcgaagaagacggaaagtgttatgaaatcctcgttgcggaaactggcgaccgtgatgcgccgtatcgggacgtgccgatggctgccggaatgcttgcgggtccgtttttattaaaagagaggaatgaagtgtttcttcggaaatggagccaggaacttaagcatactgaacaaatttatgaacagatcagccgcagcgcaaagcatgaaagtcatgaaaaattagctgaattgaaagagcggatttctctgctgaaggaggtaatcggacatgcctaaacatgtgaacggacaggaaatcatccagctgtttgaacaattttcaccgaaggcttttgcggtggaaggagataaaatcggcctgcagatcggtacattgaataagccggtgaaaaatgtcatggtgacactggatgttctggaacaaacggtagatgaagccattgagaaaaaagttgacttaattatcgcccaccatccgccgatttttcggccgcttaaacagatcaccactgatcagcctggcggaagactgattgagaaatgtataaagcatgatattgccgtatatgcggctcatacgaatcttgatgtggcggacggcggtgtgaatgatctgcttgccgaagctctcggcctgacagacacagaagtgcttgtcccgacatattcggacccgctgaaaaagcttgccgtatatgttccgaaagactatgaagaagctgtaagaaccgcacttggcaacgccggagcgggacatatcggcaattacagccattgcgcgttctcctctgagggaatcggcagctttaagccgctggacggggcagaaccgtttatcggacagacgggagagctggaactcgtccatgaagtgagacttgagaccgtttttccggcaagtatggagaaaaccgtcgtaaaagcgctgaaaaaaagccatccgtatgaagaggtggcatatgatatttatccagtggagcagtctccgcttgaaaaagggctcggccgcatcggaaaacttcagcaagacatgacgcttgaagagtttgctctgtttgtgaaagaaaagtttgacgttaacggagtccggatggtcggagagcgaaacagcaaggtgaaaaaagtcgcggttcttggcggtgacggaaataaatatatttatcaggcaaagcggaagggtgcagatgtttacgtgacgggcgatctttatttccatgtagcgcatgatgcgatgatgatggggttaaacgtcgtggacccggggcattatgctgaaaagatcatgagaaaaggcacggctgagaagcttacggcaatggccggggagaaaaactatgatgtgcgcattttcgcttccgaaacagatacaaacccatttactttcttataaaaaaactgaggcccccggcctcagttttttatttttactttcggaaggattttttttagcggcacactgtgttcaagctgccatgtcgattcatcgttgtggtcaaactgctctaaaaagcggatgacttcctttgtaatcggtgtcggtgttgatgcgcctgcggtaacggcgacggtattgacgtctttcagccattcgagcttcagttcactgatgtctccgattcggtaggcttttgttccggcgatttcttctgacacttgagccagtctgttggagttattgcttttcggatcaccgacaacaatggttaagtccgctttttttgcctgctctgatacagcttcttgacgaacctgtgtggccaggcagatttcctgatggtattccacgtacgggtacttttctttgactgattccataatatcgtggacgtcccactgggacattgtcgtttggtttgtaacgattaatttctcagcctgaatatcgagatttctcacgtcttcctctgtttcaacgagatgaacgatttcaggagcgacgccgacggctccttcaggctcggggtggccttttttaccgatgtatatgacgtgataaccttcagcttttacttttcggattaagtcatgtgttttcgtgacgtccgggcatgtggcgtcaatcgtaacaagccctttttcctcagcggcttttcttacttccggagataccccgtgagccgtgaaaataacggttcctttttccacctgctttaaaatctccagacggtttgtgccgtcaagcgtgtaaatgccgtcttcctcaaacgcatctgtgacatgcttattatgaacaatcattcccagtatatatataggtcttggcagtgttttatcgagtgacgcgtttttggctatgaccatggcatcaacaacgccgtaacagtagccgcgcggcgatattttgataacgtccaatgtagatgtcctcctatcaaaagtgagtgtagaggcaatataaaaagccgtagttaaacggctcaaatcttgcattcttctgatctcattatagctaatctttcgtgagatatcaaagaatgttaaatatataatttcggctttgatctgcccgatgttctttttggacgcggctgttccgctgagtctgcctgtgcggcgtctttttcttttgaagcggatgctttttcagacgtcttctttgatgttttggatgaggcgtctgatttgttttcatcttctgtttcatctgtttcatctgttttttcagcttcatcctttttgttctgttcgtctgtttctttcgtctcgtcagattcattctcgtcatcactgctgcttaattggctgtaaagcttcatcatggcgggcagactccgtactaaaggaccgtactgctgaatcatcggcgtaacctgctgcgccacgccgagcaccttctgaacgttgccgagcatgctcgacagggatgccggacttgccaggttctgtattccctgcagtcctgcacctgctcctccgctggccgccgccggtgccgacgcggcagcgcttcctcctcctgaaccgggtaaaaaacgggaaagcataccttttaagccccctccgccgcccgtgcctgcgtttctcaggcccgctccggcaatctgctgctgagggaaaagctgccgtccctgctgcatcagctgccgtcccggcaatgacggtcttcctcccatcatcatacgcggattcataaacggccggccctgctgcgccatatttctcatcggctgctgtggaaacatacttgtacctcctttctgtctctctgctattacaatatgcatcggagggggcatttgcttttctgtctcgaaaacaggattcccccaagacatggtgtttttaagtaaaatcggttataatgtgatgatggacacagaatgtgccgctttaaggagctgggaaaaatgaaagaaactaaatttgatggatacaacttaaaaccgtttattatagatgcagttcaccgccttggtttttatgaaccgacagatattcaaaagcgtctgatacctgccgtactgaaaaacgaaagcgtgatcgggcagtcccagacggggacggggaaaacccacgcctatttattgccaattttgaatcggattgatccgggttctgatacggtacaggctgttatcacggcgccgacgagagagcttgccaatcagattcatcaggaagcgctcaaaatcacacagggtgcggaagatgagccgatccggacaaaatgcttcatcggcgggacggacaagcaaaaatcaattgataagctgaaaacacagcctcatctcgtcgtcggaacgccgggccggatcgcggatctgattaaggcgcaggcattgaacgtctataaagcgcagtctctcgtcattgacgaagctgatctgatgcttgacatgggctttttagaagacgttgattacatcggatcgcgtatgccggaagaactgcagatgcttgtgttctcagctacgattccagaaaagctgaagccgtttttgaaaaagtatatggaaaatccgaagtacgcgcatgttgagccgaaaagaatcacagccgaaaagattgaacatgttttggttccttctaaacagcgtgataaagacaaactgctttttgatatgatgtctcatctgaatccttatctgggcattgtgtttgcaaatacgaaaaacacggctgaccatattgcgaaatacctgactgaaaaaggaatgagggtcggtcttctgcacgggggattaacgccgcgtgagcgcaaaaaggtaatgaagcagattaatgatctggagttcacttatgtcattgcgacagaccttgcggctagaggaattgacattaaaggcgtaagccacgtcatcaactacgagcttccggacgatttggatttttatgttcaccgtgtcggaagaactgcacgcgccggttcatcaggccaagcactgaccatttatgagctttctgacgaagatgcgctcgcaagacttgaaaagatgggcattgtgtttgactatgcggagcttgtaaacggggaatggaagaaaggcgatgaccgccaccgccgtaaaaatcgcaaaaagacggcaaatgaggctgaccaaattgcgaaacgcctcgtaaaaaagccgaaaaaagtaaagccgggctataaaaagaaaatgagctacgaaatggaaaaaattaaaaagaagcagagaagaaaccaatctaacagaggaaagtagggggaatcgggttgctgaaaataggttcacacgtctcaatgagcggaaaacatatgctccttgccgcaagcaaggaagctgtttcgtacggggcgaatacatttatgatctatacgggcgctccccaaaacacgcgccgcaaaaaaattgaagacttgaatattgaagcgggccgcgcccatatgaaggaaaacggtatcgacgagattgtcgtgcatgcgccgtacatcattaacatcggaaatacgacaaatccggcaacatttgagctgggcgttgattttctgcgttctgaaattgaaagaacggcagcgatcggcgcgagacagatcgtgcttcatccaggagcgcatgtcggagccggagctgaaacgggcatcaaaaaaatcattgaaggtttaaacgaagtgattgttcccgggcaaaacgtgcagattgcgctggagacaatggcgggcaaaggatcagaatgcgggagaagctttgaagagctggccgagatcattgcgggagtcacgcataatgaacatctatccgtctgctttgacacttgccacacccatgacgccgggtatgatgtcgctaatgattttgacggtgttcttaacgagtttgataaaatcgtcggcatcgatcggataaaagtccttcatgttaacgacagtaaaaatatcaaaggcgcccggaaagaccgccatgaaaatatcgggttcggagagatcggttttgacgctctgcagtacatcgttcatcacgagcagcttgccgatattccgaaaatcctcgaaacaccgtatgtaggtgaagacaagaaaaataagaagccgccgtaccgttttgaaatcgaaatgctgaaagaaaagcagtttgataaggagcttcttgaaaaaatatcagctcaataagaaagaaaggaggggcgggtgtccctccttttttaccctgagaattgattgaaaagttcgtcaactttccgcgccgtttcttttgaagttatcgtttccacttttttcagcaggcgcagccgctcctgttcatcaaaaatattgatgttttttccgtgcatcagagccgctacctcagccgcttgacttcttgtaatgctgatcccgtattgcttggaatatttcagcagatcgtccgcagtgacttgattgagccgctgcaaaataattctttgtattaaaatcatcgatactttcacctctttagacataatgtattgagcagatcattaaactgttacagcttttaatggtaaaataaagttgcttactgtttaaaatagttattataggaaaggagattttatgaccccaaataaacagcataaaagagaatcatttttacactttatcttcagggtcattatgattctgatcggggcgggttcagccgccgtaagtattgaattgtttctggtccctaataattttatcgacggaggcattatcggtgtttcattaattttagaccacctctttatgtccaatcccctcctcaattttgccttattcgttgtgttactcaacattccatttatgattttcggatataaatatatcggaaaaacatttctcatctctactgttatcggaatcgtcggtttagcgctgattgaatcctcattgcaccatgtggaggccattacgacccagcctattttggcgacggtattcggggggcttttgctcggtttcggggtaggccttgtcatccgaaacggaggctcgatggacggtactgaaatcctcggtatccttctcacgaaaaagctgcccttttcagtcggggaattcgttatgctcatcaatgtgtttattttcatttgggccggttttgtgttcggtccggagcaggcaatgtattctttcatgacttattatattgccatgaaaacgattgacgccgtcatccaggggcttgatgaaacaaaagcggtcattattgttgcagagcaatatgctgagatctcagatgcaatattgcaccggcttgggcggggaaccaccaaacttcaggggaaaggcggatatacggatgaaaccaaagaagtcatttacgcggtcgtgacaaggcttgaagtgactaaattgaaatccattgtgtttgaaattgataaaaacgcctttattacgatcatgaatacccatgaaacgaggggcggtaagttcaaaaccgcgattcactaggctttcatttacttttcatcattttataggtataatttgatacatcataagaaaatggcctgctgttcagacagctgccattttctttttggagcgataccgtgttgtaaaggggaggtcctcatgaacgtacaagaagcgttgaacctgctgaaagaaaaagggtataaatatacgagtaagcgagaagacatgctgcagctttttgctgattctgataaatatctgaccgccaaaaacgtgcttgccgcattaaatgacgactatccgggtctgagctttgataccatatacagaaatctttcgttatatgaagaactcggcattttggaaacgacggagctttccggagaaaaactgttccgttttacatgctcttatacccatcatcatcaccattttatctgtttaacctgcgggaaaacgaaggaaattgagtcctgtccgatggataagctgcacgatgatttggaagggtatgaaatcagcggccataagtttgaaatttacggcacctgtccggcgtgccgataaaaaacctcctgcttatacaggaggtttttttcagcttttgacatgctgaaagctatgtttgtttttattaatccaggcgacggcttcaagccaattctgcaccctgataatattggaatcgatggggagctgattatatggggagttaaaaaggataaccggaatgcctgcttcttttgcgatcattgtcgcattgccgtggtgatcttcgaaaaataaatcaatgccgtgttttttgacggcttccactttgtgatggcctccgacaagctcaatgtgatcgtaatgaatgtcccggtttgcaaaccagtccagcgtaacatcttctaagtggccgcgtcttgccgtaatgtagatcagacggtgctcttctttcagtccgtccagtgcctgcttggcaaattccgcgagcttcgcttctttatatatggctgcttcatgaacgttcatccattcccaaaattcctcgtctgtaatgttcaaaagcttcgtcagatcataatcagtcatatcatccaaggtaatggaaagatgaaatgagcggtttaaataagggacaaatgtatcctgtgccgtaactgtgccgtcaatatctatacctaaccgtaacatgtccacactcctataaattcatcccttcaagtgtaacataaacaattaacaataccagaaaagtttagcaaacatgaattcgtaaaaaacgcggaaactaaaaaagctcctttcataaaagaaaaagggggaattgaaggtggcatacgattacgaaaatcgaaaaggcaacgactactacgtggatcatggatcggaaggaaccgatatcacgcgtgatgtttattcagaagaaacagcggccgaaatttcagagccatatcgtgcttctgaccgggcagcagaccgtgatgataaccgggacggagtaagtgaaggccgggggatagggtatgcagcattggctatttctatcatttccctgtttgtgctccctgttttattaggggcatgcggcattatcgtcggctatatcgccagaagaagaggagcaggcgctttaggcggatgggcgatgggaatcggtattgtttcccttgtcctcggcatcttcattacaccgtttttttaacacaacgcaaaaaaaagcttggcggaatatccgtcaagctttttgtgtttcttgttctgcttttgctttttccgcttcaagctttgcgtagtgttcttctgccagcttgtcgatttcttttttcagctcttcgaccatggtttcttcagggactttgcggacgatttggcctttgcggaaaagaagtccttcgccgcgcgcgccggcaatcccgatatcagcttctcttgcttcgcccggtccgttaacggcacatccgagaacggctactttaatcggcgctttgactttagaaatgtattcttccacttcatttgcgatgctgatgagatcaatttcgatccgtccgcatgtcgggcatgaaataagcgtagccgcgtttgaagcaagaccgaatgatttcagcagttctctggctacttttacttcttcaaccgggtcggcgctcagagagatccggagcgtgtttccgattcctttgcttaaaatcgctccgagtccggccgcgctttttaccgttccggcaaacagcgtgcccgattctgtaattccgaggtggagcggataatcaaatgcttttgaagctttttcgtatgcttctatggctagattgacgtcagacgctttcatgctgacgatgatgtcgtgaaagtcaaggtcttccaggattttgatatgatgaagcgcactctcaaccattccgtcagcagtcggatagccgtatttttctaaaatgcgtttttccaaagaacccgcgtttacgccgatccggatcggaattcctttttctttcgctgcttttacgacggcttccactttttcgcggcggccgatgtttcccgggttgattctgattttgtcggccccgccctcaattgcttttaatgcaagcttgtagtcaaaatgaatatcgacaacgagagggatggaaatttgttttttgatgtcggcaatcgcgttagcggcgcgttcgtccggacatgccacccggacaatttggcagccggcttcggctaaacggttgatttccgcaactgttgcttctacgtcgtgtgttttggtcgtcgtcatactctgaatgacgacttcgttatttccgcctattgttaaaggtcccactttgacgggacgcgtttttgtacgatgtgtgatttcactcacttgtcaatcgctccttaattgtagttaccgcttttgcaggctgagccttttacatgtcaggcaacttctatttacatgttatattgtaacagtgtatttgccgaactgacaagaaattaacgtttaattgcggtagacggggaatttataagcggtgcctgcctgaattgcgtttgcttttacattcggattcagcgcttcaaaatcttgcgcaatatcatctggcgctttatgtgcgccgactatcgacatcaccgtatcgccttttttgaccgtaaccgttctgtatgaagattcctgtcgggctggctgtgccgccgctgcgtatgctggaaggtcttgagaagggatcgtgccgattttaagatcgtaaaagataatgaatatcacaaataaactgccgaatacaaaagtaagccgcttcattccaaccgcctcccgcatacatttttacttcattgtatgcttgtcccattttgttcatgacaaaaaagaagaccgccgggggcagtctttgttacacagctgtttttcttggcggtatctcttttaagacgaggaaaaggatgataaagtttacaaaccaattcactaaaaattcactcggcactgtaataacaagcgcgcgcatgatcgtaaagaatatggtcgaaagtgtaatggaataagccgaaagcttccagagctgcgggtaattcaatgtctttctttgcgcatttttcaatatcagtccgatgacggcgagaaatgatacttcaatgaattttccggccgctgtcatgatgaacagcaaaacggacaggacggtgacgatcattgttttattttggtttaatgctgatatgatttctttttttgtgatatcagcaggcatcagcgaataattcatttctgtcgcctgtccgtctacagcaagcaccattttatttttcaaaatgccgatcgcattttgtttcgccgctatttgtttagcgccgtaagcatctgtcggatcaaacacgatgacgaacccgttcgcttccgtttccttagaggcggacgctttcgtctgcaattctccgtttgaaatgctgaaatcagggaaatctttctttaacacggttttgaaaccgttcattgaatttacggtgccggagcaaaggtaataagcgcttggcagcgtaaaaaggacagacagcaaaaatacataaaggatcgcttttcctatcccctgaaaccgtgtttttgcaatatctgccggagagtatgtacttttcaataaagccgtaaatatgttcaacatcttcacttcctagcctaaactggtatatgttgcttattgtatcgttcacaggggatgaacacaagtgagagtatttaaagcggtgattaggaatcatacataataagataatgcgggaagcggtgatcgcccgcaaaacaaaggagggtgtttttgtcatgagtgttttgtattggctgatgatcattgcggtcttcgtcattgcttttatcgggcttgtatatccggtgattccaagcgttatttttattgtggccggttttcttctctacggatttttgttttccttcagtccttattcttacctgttttggctcattgaggcggtatttgcggccgttttattcgcagctgactatgtgtcaaatttacttggcgttaaaaggtacggaggaagcagggcggcaatctggggaagcacgatcggattattgatcgggcccttcgttattcccgtggcgggcattatattaggcccgtttatcggtgctctctgcgctgaggtgtttgttcatcaaaaggatatcaagtccgcggcaaaagtggggctcggctcgttaatcggctttttaacaagcgtggcggcaaaaggcgtcattcagctctttatgatcggatatttcttatggacggtgctttagaaaggtttaatttcggccgtgaacggataaagtgtaatatgtctgctggaatcgccggattgtgagctttttcattgattaccacgctttcttttgttacattgagattagaaaagttcgcgttaagcggcatttcagtacatatatttaaaggaggaaaaaattatggcttacaaacttccagaattgccttacgcttatgatgctttagaacctcatatcgataaggaaacgatgacgattcaccatacgaagcaccataacacatacgtgacaaacctcaacaaagcgatcgaaggatcagcgcttgcagagaaatctgtagatgagcttgttgctgatttgaatgcagtgccggaggacatccgcacggcagtccgcaacaatggcggcggacatgcaaaccactctttattctggactcttttatctccgaacggcggaggcgaaccgactggtgagcttgctgaagagatcaaaagcacgttcggaagcttcgatcaatttaaagaaaaattcgcggcagcagctgcaggccgtttcggttcaggctgggcttggctcgttgtaaacaacggcaaacttgaaattacaagcacgccaaaccaagattcaccgctttcagaaggtaaaacacctgttctcggccttgatgtttgggagcacgcgtactacctgaactaccaaaaccgccgtcctgattacatttcagctttctggaatgttgtgaactgggatgaagttgcccgtctttacagcgaagcaaaataattgagttgaatgatcacaaggtctcccgcgggaggccttgtttttttattgactttgattccttttacatatctcagtttgagtgagacaaactaatgtgtagtaaaggggagtcaatgatgagcaaaataaaaaaaattatcggcgacatcgaaataaataaagggctgctgctgttattgacgattggcggcctttactcattgggcatcgcgctgtcaaatacatttgtcaacgtgtatttgtggaagcagtcgggaaaatttattgatttggccatatacaatttgtcggtcgtgacgatgcagccggttacctttctgctggcgggccggctggctaaaaaaattgacagggtgtttattctcaggttcggcgttatctttttggccgctttttatttaagtgtgctgcttgccggagaaactgcggcttcccgtctcgttttgataggggccgtgctcggagttggatacggcttttactggctggcttttaatgtgctgactttcgaaatcacggaaccggaaacgagagatttttttaacgggtttttaggcattttgtcttcatcggcgggcatgatcggtccgattgtggccggatatgtcatttcaagacttgaaaacaatacgggttatacaatcattttcagcctgtcgctcggcttatttgcccttgccgtggtcatgagcttttttctgaagcggagggagtcgaaaggccggtttatgctgaaaaaagtttttgatgagcgccacacgaatctgaattggcgccggattaccaacgcgcacttttttcaaggcttgagagaagggatttttgtttttttaatcagcgtatttgtattcattgcgacaaacagtgagctggcgctcggaacattcggtctcgtcaattccgcggtttctttttttgcctattattttgcatcaaggctcatcaaaaaaagagcgcggaaaaaggcgattcttatcggcggattgatcttgtacggcgccctgtttctcatcatttttaaaatgagcttcacgacgctccttttgtacggagtgtttattgcgatcggctatccagttctgctcgtgccgtatgtctcgcttacatatgatgtgataggccgggcgcggcttgccagaaaagccagaattgaatacattgtgctcagggagttatttttaaatgcgggccggatcgtttctatcctttgtttccttgtcatcgttacattattcaaggaaaaagtggggataccagcggcgctcgtgctgctcggagccgggcatccgctgatttattactttataaaagacatcaaactggatacggaaacttctgatgaaacagtagaagaagaccgacaaaaacaggcggcggaaccgaattttataaaaggagaaagataaaagggttatctgtagaaaaatatcgaaaaaacctttagaatgaaaaatggcacctgaacagaaggtgtcatttctttctgtaaataagaaaaggtgatgtcatgaggagaaataaaaagaaaatagctgtaaacaaagaaaagaaaaaatcactgccgatccggcttaattttttgtttttggccgcgtttcttattttcacttggattatcgtcgagcttggcatcaagcagatcgttcagggtgatgattataaaaacgccgctaataagcaagaggagtctgatgtcagcacggcggttccgagagggaaaatatacgaccggaacctaaatcccatcgtaacgaataaagcattaaatgcgattacatatacacgttcagcctcaaccacccaggcgcagcgtttgaaaatcgcaaaaaaactgtcgggtatgattaaggtaagcaccaaaaaggtgactgagcgggataaaaaagactattggatgttaacgaggcctgatgaagcgaaaaaactgattacggccgaagaaaagcaaaaagctgaagacaaaaaactgtctgacgatgatttatatcagcttcagctgaaacgcatcacacacaaacaactgaatgagctcacttctaaagacatgcagatccttgcgatcaaaaggcagatggattcaggctactccctgacgcctcaatacatcaaaaatgaaggcgtgtcggcaaaagaaatggccgtcgtcagcgaacatttagatgaactgccgggagttgacgtgacgtctgactgggaacggtcttatccttataaaagcctgatccggacattgctcggcagtgtatccagttcgaacgaaggtcttccgtccaacctgctggatcactatctgtcactcggctacagccggaatgacagggtcggaaaaagctatttagaatatcaatatgaaagcctgctgcagggtcaaaaagagaaagtgcagaacttaaccgactcatccggaaatgtcacgggcagcaaagtgatttcaaaaggacaggccggcaaagaccttgttttatccattgatatggacctgcagaaatccgttgaaaaaatcattgagaaaaatttaagatcggcaaaagcgagaccgagcacgaagcttcttgatcgggccttcgtcgtcatgatgaacccgaaaaacggagaagtgctgacgatggccggcaaacagattacgaatgaccatggaaagtacaaaattaatgattatgccctcggcgcaatgacttcctcctacgcaatgggatcggcggtcaaaggagcgacggtgttgaccggactgcagacgggcgcgattaatttgaacaccgttttccaggatgaacctatgtatttcaagggaagcaaaaacccgaaaaaatcatggacgaatttaggtcccgtagatatccaaaaagcgcttcaggaatcgtcaaacgtgttcatgttcaaaacggcgattgccgtcggtaaaggggaatacaaaaaaggccagtccctgccgcttgatatgaaggcattcgatactttcagatattacttcaatcagttcggactcggagttaagacggggattgatcttccgaatgaagcgaccgggtaccaagggtcacagcgaatttccggtcttctgttagactttgccatcggacagtatgatacgtttacaccgctgcaaatggcgcagtatgtatctacaattgccaatggaggctatcgtttgaagcctcagcttgtaaaagaggtcaggcagcctgattcgaaaaaaggaatcggagccgttgtagagtctgttcagccccaagtactgaacaagattgatatgaataatgcagacattaaagaagtgcaggcaggtttcagacgtgtcatgacaaaagggacagccgcaactgattttgcgacggcgacatacagtcctgccggtaaaacgggtacggcacaatctttctatgacggtccggacaaatcagagacgggtgaaggaacgtataatacgactcttgtcgcttatgcacctgcggataatccggaagtggctatttctgtagtcgttccttgggcctatattgattacagcgatcgatattcgattacgaatgatataggaagagcagctctggacaaatactttgagctgaaaaagaaacaagaagataataatacgaagcagaaaaacgaagataaaattcaggaagacgctgaaaacggcaatacaaatcactaacagaaaaacgctcacaacttgtgagcgttttttttatacaaaaaaacatccggatttacaaaaccttaacacttgatttatacgcattttacaagaaccctttactctagacctgtaggacaaattacacattaaatgcagggggaattcaggaaatgaaaaaaaacaaatggatgcttatgcttctgatggctgctgttatgattgttgctgcagcatgcggaaatgcaaaggaaagcggcaagacagacagtcaatctgcaagtgaggataaaaaagcatcaggttctttaaccatttctggttcatcagccatgcagccgttagtactggcagcggcggaaaagtttatggaaaaacatccggatgctgatgtgcaggtgcaagcgggaggttcaggaacaggtctttcgcaagtgtctgaaggggcagtgcaaatcggcaactcagatgtctttgctgaagaaaaagaaggcattgatgcaaaagccctaaaagaccaccgagtagcggtagtggcgatggcggctgcggtcaaccccggtgcgggcgtaaaggatataaccaaaaaacagctgacagacgtctttacaggcaaaattaaaaactggaaagagcttggcggtaaagatcaaaaaattacactcgtgaaccgtcctgattcatcaggaacgcgcgctacgttcgtcaaatatgctcttgacggagcagagcctgcagagggcatcacagaggattcctccaatacagtcaaaaaaatcattgcggaaacgccgggagcaatcggttatctggcattctcttatataaacgatgacaaagtaacgcctttatcgatcggaggcatcaaaccggaagagaaaaacgtcgtcacaggcgagtatccgatttgggcttacgagcactcttatacgaaaggtgaagcgtcaggccttacaaaaacgtttcttgactatatgaacagcgatgaagtacagaaaagtatcgtaaaagatcaaggctacattccgatctctgatatgaaagtcacacgtgacgcaaacggcaagcaaagctgaggggagggcgggctccccgcctcttcttccttataggagtgtaaacaaatgataaatcacagagaaaaagagtctgtaagcgaacgcttaataagctcaaaacaaaacaggcaaatggatgaagtccgcggaagggtgattgtgtctgtgtgtgccgcgattatcattgcggcatcagcggcgatcacaatttttctcggcattaaggggctgcaatctttttttgtaaatggtgtaagcccgattgagttcttaacaagtctgaattggaatccaacccaggcaaaacctgagttcggcgcgctgccttttattttcgggtcatttgcggtcacggttctgtccgctctgatcgcagcgcccctcggtattgcgggtgccgtgtttatgacggaaattgcgccgacttggggaaaaaaggtgctgcagccggtaattgagctgcttgtcggcattccgtccgtcgtttatggattcataggtcttacagtattggttccgtttatcggctcttttaaatcaagcggaacgggtcacagccttctagcggggacgatcgtactctcggtaatgattctgccgactgtgacatcgatttccgctgatgcgcttgcgtcacttccgaaacaccttcgcgacggttcatatgcgcttggtgcgacgaggtggcagacaatcagaaaggtgcttatcccggcggcgtttccgacattgatgaccgctgtcgtgctcgggatggcaagagcgttcggagaagcactcgctgtacagatggttatcggaaatacaaagcttctgccggaaagcctgcttgatacggcgggaacattaacgacgattattacgttaaacatgggccataccacatacggcagtattgaaaataatacgttatggtctatggggcttgttcttcttatcatgtcgtttctgtttatattgctcatacgctacttgtcatctaggaggaaagtgtaatgaaccggaaaataacggataaattggccaccggtgtattcgggttatgcgccgctgtaatcgcggcgattttggcaggattgtttttgtacattcttattcacggcgtctctgaaatctccttgcattttcttacgtcaaaatcgagcgccattgcgtcaggcggcggaatacgggatcagctttttaactccttttacattctgtttatcaccatgctgatcacgataccgcttggagtggggggcggcgtctttatggctgaatatgcgccccaaaataaaatcactgattttatcagaacgtgtattgaggtgctgtcttcgcttccgtccattgtcatcgggatgttcggcatgctgatgtttgtaaacctgaccggatggggttacacgattatcgggggcgcgctcgcgttaacggtctttaaccttcccgttatggtccgggtgacggagggcgcgctcactgcagttcctaaggagctgaaagaagcttctctcgctttaggcgtatcgagatggcataccgtcaaaacggtgctggttccgagtgcgattccttcgattttgaccggagccattctcgcatccggaagagtatttggagaagcggccgcattgttatttacagcgggactgacaacgccgcggctgaactttacggatttgaacccgttttctgaatcatctcctttcaacattttcaggccggctgagacgctggcggttcatatatggagtgtcaatacgcagggaatcatccctgacgccgaagcgattgcaaacggcggctccgcggtgctggtgatttcggtgctcttgtttaacctttgtgcaagatggctcggatctgtcatttataaaaagcttacggcaaattaatcggaaagaggcgaaaacatgattgatcacatcatcagggaacaagcggaacagacaaagcgttcgccggagtcttcaattttggaagtgaagcatttatcaatttattacggtgacaaacaagcggttaaagatgtgaacatgaatattgaaaaacatgcggtgacggctctgatcggtccgtccggctgcgggaaatcaacatttttgagacagattaacagaatgaacgatgccatcccttcggcaataagcgagggagagatcctttatgaagggctgaatattttgggggaagcgattaatgtcgtgtctctcagacgggagatcggtatggtgtttcaaaaaccgaatccgttcccgaaatccatttacaataacatcacacatgcgctgaagtatgcgggggaacgcaggaaagccgttttggatgatgcggtcgaggaaagcttaacgaaggcggcgctttgggatgaagttaaagaccggcttcattcatcggctctttcgttatcaggcggccagcagcagcgtctttgcatcgcccgtacgcttgcgatgaaacctgccgtgctacttttagatgaaccggcctcagctctggaccctatttcaaacgccagaatcgagacgcttttgacagaactgaaaaaagattattcgattattatcgttacgcataacatgcagcaggcacttagggtgtctgaccgaacggctttctttttaaacggggaagtggtggaatacgggcagacagaacaaattttcacgagtcctaaagcgcaaaagacagatgactacattaacggaaagttcggatagggggaaggactgtgagccttgtgaaggaagcggtgcacacacagaatttatttgatattcacggcatgaacgtatggtacggagcccaccaggctttaaaagacattacgatcggttttgaggagcggaaggtaactgcgatcatcggtccgtccggctgcgggaaatccacttttattaaaacattaaacttaatgctgcaaatggccccgaatgtcaaagtgacaggcgacatgatctataacgggcgcaatctgctgaaagaaaagacggatgcggcagaattaagaaaacagatcggtatggtgtttcaaaaaggcaatccgtttccccagtcaatatttgagaatgtcgtgtacggtccgagaattcacggcgaaaaaaataaaaagaaactgcttgaaatcgccgaggaatctttaaaggcagctgcgctctgggatgaagtgaaagatcgccttcaccagcaggcgctttcactgtcaggcggtcagcagcagcggctgtgcatcgcaagggcgctcgccacaaaaccggacgtccttctgatggatgaaccgacgtctgctcttgatcccgtgtccacgcggaaaatagaagagctgattttgacattgaaagaaaagtatacaatcgtcattgtgacgcacaacatgcagcaggctgcgagggtctctgatcaaaccgcgtttttctatatgggcgaactggtagagtggggcgatacgggcaaaatattttctcagccggatcatcaaaaaacacatgattatatcaccggaaaatttggataaaaaaacgggcccggccattgaccgggtccgttttatactgcctattaaaaaagcctgccggccgtatccatctgaatggacgatgcctgcaagcttttttagcgggttaatgttttgacgatttttttaaagctcatatctgagtcgactttgaaatggccggcgcggatttctttatggtagcctgcgtcaatgacgtaatcattaaagtcctttgctgaaggaataatcccttctttttcaagaatggatgacacatcagcagtgctcattccgtctttaatcgtcagtttgtatgttacttttttctttttggcgtctgtgttttggtcgttgtttaacgatttttctttagaatcaagcagtttttgatagtcatcccggttgacggagactttttgctgatcgtcgaggtagctgtttacttctttttctgtcaatgctgttttttcggttttaacggcggctgcctggtcatggtcagtcaaatagaagacagcggcgagaacggccgtcgctaaaatcatgcctgctgcaaaagcctgaatgccccgttttgtcatacgagcaccttctcattatctttaataatggtattgacgtcctcgacagacacgtgctccgcttttgcgatggcttccgcagacattccgttgttatattttgaaatgatttgtttggcgattttttggttaatgccgctgcttttggctttgcggatcacgaggttggtttccagcaattcttcttcaagcaccgtcattttctttttcaacttgtaaatttcctgcatggcggaaagctgaagcgtttcaagctcctgttccacgtctttcatcggatctctttgagaatatgagaatgcaataagcgctatactgacgataaacaacgcaataatagcaatttccacgtttcatcaccttctattattaatttgcccttcttttttataccataaaacgccgccattctaaaggaaatagagaaaaaaacggaattttgtcgggaaatcttttttattcggggagcaaacggttatttctctatagatttcgtatcagaaagtccttttttgtcctgtttcgtcatattttcccttcatctgacgcaagctcattcagaggatcagaagcataaactgatgttttctgcacttaaacaacatttcatgtaaatcactctagcattccgtccattatagtggtattatatataagtctgaataagtaaatgatatttagtttggagggaaaataatgcgcgttaatattactttggcttgcactgaatgtggtgagcgtaactatatttctaaaaagaacaaacgcaacaatccggaccgcgttgaatttaaaaaatattgcccacgtgataaaaaatctacgttacaccgtgaaacaaaataagctgtttaaagcagcggaaaaagctggagctttcaataaagttctggcttttttgtctttcagggaggtttgagaaacgtgaaagcacaaatcagaaccgctataaaagcaaagctttctgacatgacagaaagtgaatgggagaaaaaatgccgcagcatgcgtgaaacgctgttttctttaaaagaatggaaacaggcccgcgtgatcgccgttaccatctcgacacgcctggaaattccgacacagccgattattgaacaggcctggaaagagaaaaaacaagtctgtatcccaaaatgctttccgcagacgggagcgatggagttccgtacattttctgcgtatgatcagctggaaaccgtatatgcgggcctcagtgaaccgatcgagagcctgacggaaaaagccgcccaaacagacattgaccttgtggttgtgcccggcgtggcttttgaccgggaaggcttcagaatcggatacggcggaggatattatgatcggtacctctccggttataaaggccgtaccgtgtcgcttctctttgactgccagctgacagaccgcattccccgcatgccccacgatattccggtcgatatgatcgtgactgaatctgaaaccatcgcttaatcgcataaaaaacttcttgcaccggaataattctcgctgtttgacaaacgataggggcaggagggataagatgaaaaaattgttgatctactcattatgcgccgtatctgttttagccgtttaccaaaaccgctaccgtctgatgaacagcgtgctcagccagccggggatcagacggtcattcattcatttctttttaaaaataccgtttatcagaaacaaattcattcagcaggcattttaaacaaatcccgtttttcagcgggattttttgcataagaaaacctgccggtaaaaaacggcaggttttctcgtattgtcagctctttttcaggaaaccgagcagaattgagatcataggagaaatgtacaggaaaaaggtaaacggcaggtagtcgatgacggaaacccctaatgcgcttgccataaaagcgccgcttactccccagggaatcagcgggttgatcaatgttccgccgtcctcaagcgaccgcgcaaggtgaatccgcttaatgctgagcttgtcatataaaggtttataagattgacccggaattaagatcgacaaatactgctcacctgtcgcaaggtttacgcctatacttgagaagacggtcgccatgacaagacgtcctttcgtatgcacgccttttatcaatccttgaagcagcgccgcgatcaggcccgttttttccatcaggccgccgagcgcaaaggcgatcatgatcagagagactgatcccatcatcgattggagcccgcctctgttgataatgctggccacagcctggtcgccggttttaaacgccgtcccgctttgcagggcggatataaatccttgaatgctgctgtcaggaataaaaacagcagtcagaagccctgcggaaataataccggcggtaagcaccggaatcacggaaacccgtctcacagctaaaatgatcaccagcagaggtgaaagaagcgaccaaggcgtaacgtgcacggcctcttttattccggaaatgaccgcctcaatattttgcgttgaagcggcatttattgaaaccgatgaaccgagaatataaaaaagaacaatcgtgatcagaagtgccggaacggtagtgcccatcatatggcgaatatgcttaaaaatcggaatttcgccgattccggcggcaaaattcgtcgtgtcggacatcggtgacattttatcaccgaaacaagccccgcaaatgactgctcccgccgtccattcgagcggaactcccgccgcgcttgctacccctaacagcgcgacgccgattgtactgacagttgtcagacttgagccgacaagcgtgctgataatcatgcaggaaaataatgcagtcaaaagcagctgactcggctgtataattgacaaagcataaacggtgacggtgggaatggcgccgctgtacatccaggcgccgatcagcacaccgatcaaagccagcacgataatcggctgcacaccgtttttcaatccgctgacaattcctttttcaagactgtcccacgagaaaccgagccacaaacctgccagagacagaataatgacgcaaaagaacagcggcatatgcggctctgtatgaaagaaaaacaggcaggaaataatgactgctaacatcaagacaaataaactgatggctgagatgaacgtcagccttttttcttgtttcaaaacaacaccccatcaaactttaatccttttgtgcttttgggcacgaaagtattgtaacagaaaaacgcataaatgagtgtttttttacaattgtgaatatacaatttatgaaaataatacaaggatattttctccaatcgttttttgcttgacgcccggatcagtgatgaaatacgcttatactaagaagaatagaaatggtgaagaagatgaattcattttatgacgtgcagcagctgtttaagtcattcggacatatcgtttatttcggtgacagacaagccgaaattgactttatgaaagatgaattaaaggaaatgtacttgtcaaacgtgattgaaagagaattatggcaaaaagccgccggagttcttcagagagaatcggagcggatcaaaggcagataacacagcaggattttaataagaaaaggagattattatggaagatacatggtttgcggggattgatcttggcggaacaaccatcaagctggcctttatcaacatgtacggtgaaattcagcataaatgggaagttccgaccgataaatcaggaaacacaattacggtcacgatcgccaaagcgcttgatcagaagctggaagaactgaacaagccgaaacggatcgtaaaatggatcggaatgggagcgcccggacccgtggaaatggcgacgggaatggtctatgagacgacaaatatggggtggaaaaactatccgctgaaagaccatctcgaggcggaaacgggtattccggccgtcattgaaaacgatgccaatatcgcggcgctcggagaaatgtggaagggtgcaggtgacggggctaaagatgtcattttagtgacgctcggaaccggagtcggcggaggcatcatcgtcaacggagaaatcgttcacggaaaaaacggggccggcggagaaatcggtcatatttgcagtattccggaaggaggagctccgtgcaactgcggaaaatccggctgcatcgaaacgattgcgtccgcaaccggcatcgtccgcatcgcgaaagaaaagcttgcggcggtttccgactcttcgctcttacaagtgcgcgatctgacagcacgtgacgtgttcgatgcggctaaacagcaggataagacagcgcttgaagtcgtcgattatgtcgcaaaacatttaggcctcgtgctcggaaatctggcaagcgccatgaatccgacgaaaatcgtgctcggcggaggcgtgtctaaagcgggtgaaatcctgcggtcaaaagtggaagagactttcaaaatcaccgcattcccgcgttctgcggaagcggcggatatttcgattgcggcacttggaaatgacgccggagtcatcggcggggcgtggattgccaaaaatgaatggctcaaacatcaaaactgctgaagaaagtctgcctgcccatatcgcgggcggctttctttttttatctcccctgtcatatagtttttaaaaaagggggatgaacatggcgggaattcgtgtcaaacctgaattgaaacagcatatgaaagatattgcaaaggtgctttcaattgatgaaaaactgttgaaagccgctgataaaacggcggaaaatgatgaattattttgtcccggctttgccgtgagcgggcagtcagagggtccgccgcttgagacgctgagcgggctttcgcgatacatccggcactgtgaaaggattctttccgctgatcaatgggtgaaggaagaaaaggtgtacggctcccaatcggtttatgaagaaattgagaaaataacggatgtctttccgtttgtcacgtgccgtaaaatcggcagttccgtattgggaaagccgctttatgagctgaaaataggtgcggatacggccgaaagaaaagtccatgtaaacgcctcatttcatgccaatgaatggatcaccacctcggtcgcgcttaaatggtgtaaagaatattgcgcggcattatgcgaaaataaaaccgttttcgggcactctgcgcttgatatattcagccggacatcattgtcattcgttccgctcgtaaatcccgacggtgttgatctcgtactttacggatgtgaagatttatcagaaaaaaatgaatttcttaatgaattaaatgagcagcgcccggatttccgcgaatggaaggcgaatataaacggtgtggatttaaataaacatttcccatccaattgggatattgaacagaggcgcaaaccgaaagccccttcataccgtgattttccggggacggcgccgctcactgaaccggaggcgcaggcaatgcaccggctgataacgaagcagccgcctgacaggctgatcgcgcttcatacgcagggagaagagatttattggggatacgaaggatgtgaaccggagcaatcatcccggatgattcgggagtttgaagcgataagcggaaaccgctatcaaggcgttaaaaccattgacagccatgccggttttagggattggtttatacagcagtatggaaaagagggctataccattgagctcgggaagggaaaaaaccctttgccttttcatcagtttgctgatatttatcaagcgacggaaggtattttgtggaggtcgcttgttttttgagacatctgtgaaatttctcatttgtttacataaacaaatatgggacaatagaaaagaatggagggaaggctggtgagatacttggtttgtgttctgctgtccgcattcgttctgtgtttagcggcctgtgaaccatctcatcagcagcaagacacaggcgtttcggcaaaatcggcagaacagaaaatcgttccgctcagtaaaaaggaagcggagaaaacggaaggatggctggataacagaacgatcctgtatacagcacatcatcagctgatgaaatatgatcttttcagcggaaaatccgaacggctctatgaaacaaagggcaatattgtcaatgtaaagatcagccggaaaaaacagctgattctcgtacaggtgacaagcagcggtcagactgagcttgtgcttatgaacaagcaggggaaaagactttatcacaaagcctttaactcttatgagctggagacggcttggaatccgtatgacccgtatcaaatgatgattaccgtttttactgaaacatgggacttcactgcctatacggccgatatgaacaacggcattttaaaaaagagtcccgttcaggccccttttgtccattggacctccactgatgaattccaatatatcaagcaaggaaaaacggaggaagagggtcctttatattcttatcacttgcagacaaaaaaagaaaaaagagtgcttcatcacgtcatctgggccgattcccgcccgggcatgacgattgccgtcagacaaacggatcaatcggacggagacggcgagttccttttccaaaagccggcatccgtgacgcaccgctttcctctccaagaaaagtatcagagctttgcgccgatggaatatgattacgatcagacacacaagcggttttacatattcaagcctgaaggccgctcttacaatctgatcagctttgacttaggagacgaacgggagcggacggtgctcaaaaacacggaaatggagccgattcagatctctccgaacggggaatacgctttatacggctttacgtatgaccgtctgatttcactgaaaacaggcatgacagaaccaatcataacaaatgaaaaaggagtttgaaccaaatggcaattgcagatgtgacaatcattccgatcggaacaaaaacaccgagcgtcagtgagtatgtagcggatgtgcaaaacattttggagggttacaaagctgccggcaaaatcaaatttcagctcacgccgatgaacactttgattgaaggtgagctgagcgacttattcgcagtcattcaggacattcacgaagccccgttccaaaaagggctgcacagagtggcgacaaatatccgcattgatgacagacgtgataaagaaacgacactggagagcaaaatcaaaagtgtcagcaaacatttgcagcaataaaaaataagcctgtatccattggatacaggcttttaatgtgcagtcggatagccgctggttacaacggtcattacggtaaaccagccaaacacgcccagcgtggcggcggctaacaaaaatcccaggatatttctctgtctgacagcccgcaggactcctaatacagctaataatgcgacaaggccgaagattacaacaagtaacatcatgctcctcctttgtcattggaacctgaaaatctttccatttcattttaaccgttttcattttgtttgtcgatagcgttttcccggccgcattcattgaatcttccgcagaaaaccttcataataagggcatatacataaagaggtgatgaaagtgaaatggagacgaatgccggccggtccgattcaggcaaacgcgtattttcttgtcagtgaggatcagtcctgtcttatttttgatccgggcggagaagcggacaaaatcaacaattacataaaagaaaacaatctgaagccgctggccatcttactgacgcacgcccattttgaccatatcggcgcgcttgacgaagtaagagacagatgggatgttcccgtatatcttcacaaaaatgaagaaaagtggctggaggactcttccttaaacggatcgggcatattgcggggcatcgccgtaacggcacggcccgccgaacggctcatcgaaggcgacggcattttggacatcgggcctttccatttggagacattgtttacgccgggacattcaccgggaagcgtttcttattatgtgaaggacgcggatctggtgatttcaggtgatgtgctctttcagggaggcatcggccgaactgatttacagggcggaagtcaggacgtattgcttgattccattcatcaaaaactgctcacgcttcccggacatacacttgtgttaagcgggcacgggccggaaacggatattcagacagagcaggagcgaaacccgtttatcaatggtttttcactgtaaatgaaaaaagacagaccataacggtctgtctttttctgtcagtgggttccgccgcccggtgtcataataaaaatagagtaatatgtaaatccggcgaaaaatacggttaagtaagctccgaaaatataaatatacatccgctcagtcagattcaaataagaaagaaatacgaaaaagatcgtctgtccaaaaaacaaaagtgaagcgtctttcatgccccctaaaaaaaacataactgcaaatatccccgtccaaaatcctaacacccggaacatgcgattcattccttatcccctcccgagagtctatctgaagtttattataatagatcggcactcgaaatgtaaacattttcatgattatatttattgtggaatttatgtctttccctgtgttttatatcttatgccgctctctgaaaaagatccgaaaaatctttttgaaatatgtttaatgaaaaaaagttcagggtacttatgttaacaaagagacggattatccgagggaggaatttttaaaaatgaaagaacttattttttattcatacccgagctgcacatcatgccgaaaaacgaaacattggttaaaagcccacaatgttgactttcaagagcgccatctattcagggagacaccgacaattgatgaattgaagcagatcttatcattaacgactgaaggaattgatgaaatattggcgacgagaagtcaaacatttaaaaatctcaacctgaacattgaagaaatgactgtaaatgaagtgctgaagcttttgactgagaagccgaaactgctgcggcgtccgattctgatcgatcgaaataagctcgttatcggatacaatccgggagaactgatgaagctgacgaagaaaaaaacggtacatcaatctgtatcataagagaaaaacgaagatccgctgatcaaaatttatcagctaatcttcgttttttgcggttgcgggactgggctagctggattcgaaccaacgatcacggagtcaaagtccattgccttaccgcttggctatagcccatcggatgtaattacagtatgtgcgtccggcgccgatttatacatacaaaggaatttgaatggaggagacccgtgaaacatttgagtgaaacattatctcgaaccttaattgaagaatcaggtgaaatcacacgccagtggctgctcataccaaaatcggggcggcctacagatgatcagaaagcggaaatgcagcaccgtctgttaattgaaatcgttgccggcattttatcggaaaaagacggcggggaagaggagctgacaaaatgggcgcttcagttcgcaagggaccgggccgtccatgaagtaccggtctatgaaagcgtcacgagctttaaagaattccggagattggtctggaaccgcatacagacgtgctgtgaaacaatgtctgagaagcctggggcgaatgcggtattccattggggagagaagctgaacaaagcaattgaccatatgattgaagtatttacagaggaatattataaagtgacggttacacaattaaacgcccaaaaagaaatgattaacgaactaagtgcgccgattatgccgattgccgacggtattggaattttgccgctcgtcggcgaaattgacacctaccgggcaaaaatgattttggaatcggtgcttgaccaatgttcttcactccgtctttcttatttatttttagatatatcaggtgtgccgattgtggatacgatggtcgcttatcagatttttaaagtgattgacagcacaaaacttcttggcatagaaacgacaatctcaggcatcaggccggaaatcgcgcagaccgtcgtgaagctcggcatcgatttttctcaggtgaaaacggagcagagtctggcgaaagcgctggcaaaaaacggatttatcgtaaaagaatcattaagatgataaaaagctgaatggccgggagggatgtctccctcagctattcagctttttcagcttcaatcgtaatgatatgatggctgtcgatttcttttaccgtaaatgtgtagccttcaaaatcaatggtgctcccgggcttcgcgtcaatatgctgagtaagaaaccagcccccgagtgtatcgacttgatcagccgtaatctctgttccgagtacatcattgacgtcgctgatcagcaatttggcgttcaggagatagcggttcttcccaagcttttgaacggaaggtgtttcatccgtatcaaattcgtcgcggatttcgccgacgatctcttcaatgatgtcttccgccgttactaatcccgcggttccgccgtactcatcaatgagaatggccatatgggcgtgttcccgctgcattttaacgaataattgataaatcggaatcgtctcaatcacatggatcgccggctggatgtaagggctgagttcgtgttttgtaaacgccgctccttctgacaggaatctgaataaaacttcttttatattgatgatgccgactacatgatctttatctccttttactacgggataccgggtatatttatttgttttgataatgtcccggagcatatgtcccgatccgctgtctaacggcagactcaccatttcattccggggcaccataatttctttggcagtgcgcttatcaaatgtaaaaatgttatttacgtaatgcagctcgctttttttaatcatgccgcttcgatagctttcggcaaggagcacccgcaattcctcttccgtataagccatttcatgttcggaagcaggcttcaagccgaacatggctgtaatcaggcgggcggaatgattgagcagccagatgaacggaaacattaacttataaaacaaaatcatcggtctggcagacaaaagtgtaatccgctcggctttttggatagcaaaacttttcggggcaagttcgccgataacgacattcacatatgtaaccagcagaaaagcgatgatcaatgacaggacttgggcaaccgcttcgtgaactccggtctttaaaaataacggctgaagcatcgctttgactgtcggttcacccagccagccgattcccaaagcggtgacggtgatgcccaattggcatgccgataaatattcatcgaggtgtgtaatgacatgcttggctgcttttgctccttttacatcttcctcaatgagctgattaatgcgggagcgccttgctttaacgattgaaaactctatggcgacaaaacacgccgttaataaaataaatagtacgatggcagacagtttgatgatatacaatgtaacgccttccgcgaaggaaggcttgcacctcccttttttcggaataataccactgtagaaagctgctcaaacatcgaacctggtttagcctgcttcatttacggtaataaaacaagaaagcgatactggaggatgacaagagatgaaggtacattcgggtgcggactggctgtggtaccagctcggtccgcatgaaaaaacggaagcgaaaaaaatgatccaccacaatcactggccgcaatgcgaaaagtggtttgaacatgaaaatcatataaactttctgcgctcagatacaaatgatcagaataatgaagcggttttcggttctttaatctatcatcaaggattagatgatgaaaaaaaccataccgtatttcacttttatattacgagagacttcttttttacaattaattttgatttttcgctgctgcgcggtgtaaaagaaaagcatgccacacagcagatccaaacctgtgaaaatccgattgaaggcttttttgttctgctgggagagctgatgaattcctatctgatcggactggatgaatttgaagtcaagcagcggacgctgaaatggcagattcatgatgacaacagcaaaggaatcttggaaaatgtgcataaactgcgccatgagctgttcatttggaaaggccttacactgggggctaaaaaagtggaaatggctttaaaagaagcttttctcccgaaaaatgacaggcagaaagattacctcagagctcatcaaaagatggaaagaggaattacatatatcaatgagtttgatcaggaactgagcaatctgctgcacgccgaggaagtcattacctcccaaagaggaaatgaaattgtgaaagccttaacgatctttacaactctctttacaccgatgacggcgcttggagctctctgggggatgaactttgataacatgccggagcttcattggaaatatgcgtatatttgttccatcgtgctcattattgtatcaaccctgctgatttatatttatctgcggcagaaaggctggacaggggacattttgagggagcatcaaaaaaaatatttgcggaaagaaaagaaacgctaagaagagcaggcatacgcctgctttttttgatggctggctgaaaatggccgaatggttcccgagttcattcggtaaatcagagtcagggggcttattttttatttttttacgttttacacactgtaaaacgcataatctctcctttgccggcttctgtgtatctgatttacaatacgtgcggaaggagggaagtcttgtgaaaaatattgaaacatacagcaggaacatcataaacgaggcctatacggcaagggcttcagatatacacattgtgccgagagaaagggatgctttcattcattttcgcatcggccatgctcttgtgaaaaaaagagtcttaaaaaaagaggaatgcgtaaggctaatttctcattttaagtttttatcggccatggatataggagaaagacgtaagccgcaaaacgggtcattgtctctgccgcttccgacggaaaccgttcatttgagaatgtcaaccttgccgacaatgaatgatgaaagtcttgtcatcaggcttttgcctaagcggcagattccccctctggataaattgtccttatttcggggggcgggcgccgcactattgtcctttctgaagcattcgcacggcctgcttctgtttaccggccccaccggatctggaaaaacgaccactctttactcgcttgtcaactatgcaaaacggcatttcaaccggcgtattgtcacgcttgaagaccccgtagaaacaagagatgaggatgtgctgcaagttcaggtgaatgaaaaagccggagtcacatattccgccggtttaaaagcgattttaagacatgatcccgatatgatcatcttaggggaaatcagggatgccgagacggctgaaatcgcagtccgcgcggccatgacgggacacctcgttctttcaagcctgcatacaagagatgctaagggcgccatatacaggctgctggagttcggcgtgaacatgacagaaattgaacaaaccgtcattgctattgccgctcagcgtctggttgatttaacatgtccgttctgcaaagaggaaaactgttccgtgtactgccggatgtacaggcagacacgccgtgcgggcatttatgaattgctctacgggaaaaacctcacccaatgctttcaggaagcaaagggagagcacgcgaattttcaatatcagacgctccgcaggctgatcagaaaaggaatcgcgctcggctatgtcacgaccgacaattacgatcggtgggtgtatcatgaagcggattaaccgaacctggcccttgaaggatcaagcggcttttttgaaaaggctcggtgaaatgacggaaaaaggatacagtctgattgaagggctcagactgctgcaactccagctgcataaacgtcagcttgcagagctgacggacggaatccgccggctgagggaaggtgatgcgttttaccaagtgcttgaggcactgtcttttcataaagaagccgtctctatctgctatttcgctgagaaacacggggaattgccgggggcgatgaaacaaagcggcgacttgttacagagaaagctcatgcagacgaatcaaatcaaaaaaatgctccggtatccgatgtttttaatatcttccgtctgtgtcatgttttatatcctgcaaagtttaattattccgcagttttctgggatttatcaatcaatgaatatgaatacatccggtacgactgctttcatctttgcgttttttcggcattttcatgaagcctgcgcactggcgctgtccgccgctttctgcttgtttttgtacgtttggttcttatgtaaaaaaaaatccccgcaagataaaatgctgattgttgtgaaaataccactattaggaaaagcggccgttctttttaacagctactttttctctttacagctcagcagtcttctgaaatccggcctatctatctatgacagcttaacagcttttaaagaacaatcttttctgcctttttatcgtgaagaagcagagatgctcattacacgtctgaaagccggagaaaccatagaatccgctctttccgggcatccgtgttatgaaaaagaccttgcggctgcagtcagccacggacaggcaaacggcctgcttcaccgcgaactttatacgtacagccagtttatgatggaacgtcttgaacaaaacgcggcgaagtataccggcattctccagcctgtcatttacggtgttgtggccggtatgattttaattgtctacatgtcaatgctgatgccgatgtaccagatgatgaaccaaatgtaagggagtgcttcgtctgaaaaatcaagatggatttactttaattgaaatgctgatcgttttatttatcgtttccattctgcttttaatcaccattcctaacgttacaaaacataatcaaagcattcagcataaaggctgtgaaggactgcagaatatggtgaaagcccaagtgacggcgtacgaaatcgatcatgaaggtaaaatgccggatatgaacgatttacaatcagaggggtatatcaaaaagaatacagcctgcccgaatggtaaacagatcttaattagtggcggagaagttacagttgaacaataacaggcggacagaaaatgggtttacccttcttgaaagcctgattgtgttaagcctggcgtccgtcctgctgacggttttgttcacgacggttccgccggcctacacccaccttgccgtgcggcaaaaaacagaacagctccaaaaagatattcagcttgctcaggaaacggctatcgcagaacataaaagaacaaaaatcacttttcttccaaaagagcataaatacaaactgcagtcaggcggaaggattgtcgagcgttcttttgactcgcttcacattacacttgtgactttaccggagagccttgaatttaacgaaaaaggccatccgaattcgggaggaaagattcaattgaagagcgccgggttcacctatgagatcacagtttacttagggagcggaaatgtccatgctaaacggaaataaggggttctctactattgaaacactatcagcaatggccatttggctgttccttatgacgtctatcattccggtctggacgggcatgctgacagatggtctgaaaatagaagatcgccaggaagcgtaccagcttcttcagaaacatatcagcacttatatgatgaccggaaaaaagccgccgtctcccggtgtgaagtggaaggaggatggtgagtattacaaagtgtgtacggctgaccgcagcgaaaaagaaatgtgcctcagcattctcaaaacagactggctttacgcttcttaatgttttgttctccttggcagtctgtcttttcctatcaggcaccttgggcccgattttacatctgtttttatcaaaccgggccgataacggcggattagacagccgggagcatcaaattgccgttcagcagatcatgaacgaatgtaaacaggctgaggctgtgaagccggcggacggcggacgggcgttagcatgccggaaaaccggaggcgaagaagtgcgttttgaaatttatcataagatgataaggaaaagagtaaacggaaaaggccacgtgccgatcctgcaaaacgcggcatcattaacggctgatgtgaaaaacggcctgctcttattagagatctcaagcgttgcaggtcaaaagaatcaggcggtcattccggtttacagctcttttaaaggtgattaaatgtacaaatctgacggttttatatatcccgcggttctgtttgtttctgccgcagttttacttgtcatcagctatacttcgtctgatttcatcacccgaaaaacatttgcaaaagaggccggggagtactggatcggagagaatctgctccaaaacggcgtgctgctgtcaagccgccatatgacacagggacaaaaggtccaaactggtacacagcgttttccgtatggcaccgtttcttttcacatcacggggagtgatcgccgggaaacggttcaggttacaattcaggcggaaacaacgacaggaacgagacgggaggctcaccttttgttcgatcagaagaagaaacagctgattcaatggacggaagtataaaaaagaggcggcgggacaacacttcatagtaaagacagcactatgaggtgagagccgtgaaaacaaatgattatgtaaaatatatgactgagcaattcgttaaatatttcgatacgccgaaacaggaacggagagagcgaaaagaagtgcggaaagaaaagaaagtgccggcttctcagcactggttcggaatattgccgtatagttttaagctgtggatgaagcggaaaaaataaagtgaatcacacgaaaggccctcctgatacaggagggccttattggtattcctcaatgacggcaattttatttaccttttggctgtagggattaaaagaaatcgtaacaaacacgccaaattcttttgcgccatcccgcaatgtcaagtggtattgcttgactgcttcgtccgttcttttccgatcccacaccttttgaataaataacgtttgggcgagcggatatctttttttagcttccttttctgctaacttttcccattttgatttatggtgaacagcataataaggcaccgtttccgcctgagctgttcctgaaaccccgaaaacaagaagagaaaggcaaatcagactttgtttgatcatcattcttcgtcctttcgctgtatatactttccattttgttctaggcacctcgttattttctcacgttttattagaaaaaattccaaaaaggtgtgtaatttgaagcaaaacgctgtttttaaaagataccattctcaaaaacgaacaatttgaccgattttgacatttttcaagacgataatccttgattatactttgttcatacagttctttaaagagaacggttgtcatatttattaacagttttacagggggtaaggcatgttccgattgttgcgaatggaaaaaaagggcaaggtgagatggcggatgatgctatttttacggctttcgttcattttttgcctgtccgtgacgatatgtgctcagttcacaggtgatacaagttcctccttcaatgatgtgaaaagcttcagtctccaggttcaaacgtgcggagattttcaatatacggatgacgattgccgttatgacgaacgctgggatcaaagtgatttacatataacaaatcaaactgatacgtcaggcaccgtgtgtgcgccgcttcagctctatgccgagctggagaataagggaaaagagcggactgtttctgactggaaatgggagctccataaaatcgcttctcagcagcagcctttacgaaacggcaatgttgtggataaagggcttattactgataaaaaaagcaaaacgatttataaaattgagtcaaagcggtctttgcagccgggcatatacgcattcaaggtttacaagcctgaagggtatccggcggacgaagaaaaatttgagtggtcaaaaccgatgaaactcgtcaaatgccgggaacaggcgaccgtttccgatctaaagaaaacggagaaagagccggctgagccggtaaaagaaagcggggaagaacatgaaaaaaacgctgaaactgatcagtaatattttgtatgccgtcatcttcagcttgattattgtgctgacgttaacggtgatttcgacccgggcttccgggggtgaaccggccatcttcggctatacgctgaaatccgtgctgtcgggttcaatggacccggaatttaagacgggttcgctcatagcggtaaagaaaatttctgacgtgaatgacttaaaaaaaggggatgtgatcacctttacgcaagatgacggaacagccgtcacacacagaataatcgggatcacaaaaaaggacgggaacctgctgtttgagacaaaaggggaccataatgccgccccggatgccgcacccgttcaagctgaaaaagtggcggcccagtatacgggatatcagcttccgtatgccggatatgtcatccatttggccagccagccgatcggaacggcgattctgttaatcgttcccggcgtcatgcttttgatttactcaataacagtcatcgtcagcgccctccgcgatattgagcggaaaacgaaagcgctggaagaacatgcgaaaaagggaaccatctctacatgaatacggttgcaacctggcgacaggatttgataacaaaaataaaaagtaaggggagagtacagacatgggtatgaaaaagaaattaagcttgggcgttgcctcagccgcactcggtttagcattagtaggaggaggcacatgggccgcatttaatgatgtgaaatcgacagacgctacatttgcgtcaggaacacttgatttatcggctaaagaacaatcagccaatgtcaatttgtcaaacttaaaaccaggtgataaattgacgaaagattttgaattcagaaacaacggttcacttgccattaaagaagtgctgatggctttgaattttactgactttaaaggagcaaagaaaggaaatgaatctgcggaggatttcctcagtcagtttgaaattacggttctgacagtcggtaaagaagggggcaacggctatcctaaaaatatcattttgaaggcggccagcctgaaagacttatacttaatgtcaacaaaacaggataaagcagctgccgaagcgatcagcaagcacattgatccgaaattcctgagtgagagcggaaaagtcaatgtagcaaccattaacggcaaaacagctcctgagtacgacggagttccgaaaacgcctgctgattatgaccaggtgagaatggaaatccaatttaaaaatgacaccgcaaaaactgcggacggattaagtgtgcaaaacaagttccaaggcaatgcgatttctcttcaattctcttttgaagcaacgcaatggaacggcttgaccattacgaaagatcatacggataaagacggttacgtcaaggaaaatgaaaaggctcacagtgaggataaaaactaatccgaaagtcggacagttaaaagaggagttgtgcacatatggcggcactactcctctttttgcgcttttctccatttttgataatctaaaaattcacgaaattgtttttttgataccccggatgtcatcgcatcgcgaactaatttctcccattcactatctaattgaccatcgtattcggtttcatgtttttcatcaagtaaagtatgaaccgagacgtccagaacagcggagactttttcgagaaattgaatggaggggttcgtctgtaaatttcgttctattgagcttaaataagacttcgctaccccagctttttcagctagttctgatagtgagtagcctttttcttttcggtattgtttaatacgctggccaatcaatgtcatcaccttccttgtgatattatagcacattcagaaaggatttacggtatgacttctggctgcctggatatgttgagaagactttttatgcgaaagcaggtatttgcgtatttcttctaggctgatatttgctttttgggcttctaatatcagctcaacccattccttatctaattgcgaaaattccatttttgcatttttcatgcattttctcctcctaaaatacttgtttatgtatttcagccaatccgcccatgaccttatctttacatgtctggaagtgattcatcgcatgcgaaacgccagaaattttttctatatacttttattataatatagaatttccagaaaaaacgggaaaggtgtcgaatggataacgcttatccagaaaaattactttgcaggaaaaataaaccgccgttttcaatctgaatgtgaattttcggctgatataaggctttcagcgcttgtttttccaaatggtattcctcaggtttttcctctgtctgctcataaaactgatcgagcagcccgaggtcctttttccatctggcgatcgcgctgtcagcccaggctgacggctctttggcggcagcgtcttttaagtaatgctccattcttttaattccgctttccggcttaatcatcggcgatatggtaaagcaatagtctgatatttgcgaggtcagcggaagcggtgcaagcttctgctgaaacccttctataattgttccagaaacaagatgcaggcctaaagacaaaagtctgtcttttttcatgtcggattggtatgaaatcactacatttaatccaagccagggctgaagcggcactctggctccggctgatacaattttctcatatattcttgtaaatctcccattttgtttaactgcttgaaagatttgaaagaggcgcggggctccaaagtaaataaattcgccgtccatatcctccggagccgtttctttatcagtgatgaacgtgatcttcatcgggttcggttcgccgcccgttttttcacgccaatgccaataaaacgggcggttcataatttgtttgtccatctcgaccgtcaactgaaccgtcataaaacccggcccgtgttctgtaatcggacagtggttcgcttcaaaaaagcgcagtaaaaattcgtgaacctcctgctgtctcatgtcgcgcttcctccttttagattaagatcctttttttctggcgggcttttccgtatcgtacgacagaaaagaggtgagattgtccattttgattctcatttcttcctctgtcagcgaatggcataaaatatcatgcaaatggtcttcaaaattgctcactttgatttttgttaaaatgtcatctaattctccgacgacattttcaaataaatgaattttgtcatacagaagttttaaaatatgctcttccaccgtatgttttgtcgccatattgtagatatggacatctctttcctgaccgagtctgtgaatccttccgattctttgttcgagccgcatcgggttccacgggaggtcataattgataatatggttgcagaattgcaggttgatcccttcgcctccggcttctgtagcgatcagcacctgcactttgccgcggaagagatccttcatccagtctttttttccgcgcttaaatccgcctctgaacggaacggagcttatgccgttctgctgaaggaaccattgcaggtaaatctgtgtcgccctgtattcagtaaaaataatgactttatcattaatcttttggatcaagtcaacaacttgaatcgcttttgagttttgcgtgacttgattgatgcggtccattaaattagcgatcgtctgatcatcgaatgcgggcgcttgtttgtctttttggtcaagcatttttttgagcgtcatatacacggcttccctgcttgaacagcattctctttgcagcgtcataatggaaaatgcgcttgcgggcttttccgtgccgtttttcagtgcggcgatgtcatcgtaaagcgcctgttccgtcggtgaaaaggtgatcggtactgtttccacgtggcgcttcgtccatgtaaggccggtgtcgctccgcgtgttgcggatcatcactttattgacgagctctttcaaatgctcatgagcgtcaatcccgtccttctgattgaaggtttcttgaaatccgctttcgtttcctaaatggccgggctttaacagtgacactaaattgaagatttcttcgatccggttttgaatcggcgttgccgtcaaaagcaggcagtatttcttcacaagacttctcgcaaattcataatttttcgttttgctgtttttgagcttgtgcgcctcgtcaataatgacgagatcataaggaatagaaagcacaatgtctttgtgaggcgagcgtttggccgtatcaatagaagaaacgacgatatcgcactgttcccacacatagcttttcttctgttcaacagcgggtattaaaaacttctcctgaagctctttcacccactgggaaacgagtgatgccggcacaagaatcaggatttttttggccagcccgcgaatcatatattcttttaaaatcaggcccgcttccaccgtttttccgagccccacttcatcagccaaaatcgccttgccgttcattttttcaacgactttctgcgcgacctcaagctgatggggaagcggagtgaaatcgggcaggtataaaggagccctcaacccttcaaattcaggaatggcaagggtctgctggacttcagccgacagtttgtacatctcccaatttgaccagggaccgtccgttttcagccgctcagaaaactctcccggccagtttgcatcaaatatgatctctgctgtcatatgtaacaaaaccgcctttcttttaaaaaactgatttatcataatttttgttgccggacgtaaatgagggtggtaggatataagtaatgatttcactaaaagatattgctttagtatgtccataaaattggtaaatatgagcgaatgacagcaaggggagagactcggacgaaagatgggcgtccgggcgccgaaggagcaaactgcggagtgaatctctcaggcaaaagaactcttgctcgacgcaactctggagagtgtctgcacttagaagaagcaggccaccaaaggggacgtctttatgatatgttcataaagtaaactttcaggtgccgggacagagaaaccttcattttcatgaggtgtttctctgtccttttttatatgtttttacaatgcgccaatgactgaagggggaagatgatgctgaaacgaacaccgctttatgacgtgtataaagaatacggcggaaaaacgattgattttggaggatgggagctgccggttcaattttcttctattaaagaggagcatgaagccgtccgcacaaaagcgggcctgtttgatgtgtcccatatgggagaagttgaagtatccggtaaagacgccctgtcttttctgcaaaaaatgatgacaaatgacgttgccgatttaaagccgggaaacgcgctttataccgccatgtgttatcctgacggcggtacggtcgatgacttgctgatctatcagaaaagcgagagctgctatctgctcgtgattaacgcgtctaatattgaaaaagacatcgcctggctgacggaacatgcggaaggcgatgtcacgctgacgaatcagtctgacgggatttcactgcttgctgttcaggggccgaatgctcagtcggttcttacgaagctgactgaatgtgatttgtcctccttaaagccgtttacatttattgatgaggcggacgttgccggacgacaagtcctgctttcaagaacaggctataccggtgaagacggatttgagttatattgccgcaatgaagatgcggttcatctatttaaggagatacttgcagcgggagagcatgaaggcctcgttccgtgcggcctcggcgcccgtgatacgctgagatttgaagcgaagcttgctttatacggtcaggaattgacgaaagatattacaccgattgaagccggaatcggatttgccgtgaaacacaagaaagattccgattttttcgggaagtctgtattgcgcgaacagaaagaaaaaggagccccgcgaaagctggtcggacttgagatgattgaaaaagggattccgagacacggatacgccgtgaaaaaagacggtgttccgatcggtgaagtcacgacaggcacgcaatctccgactttaaagaaaaatatcggccttgccttaatcaaaacggaattcagtgaagtcggaacggaagtagaagtggaaatccgtaaaaaaacggtaaaagcgaagattgtccgcacaccgttttataaacgtccaaaacagagctgaaaaaggagagtcatatgaagcatcgatatttgcccgcgacagaacaggataaaaaagaaatgctgaaagccatcggcgcagaaacaattgatgaactgtttgccgatattccggaaaatgtacggtttcaaaaagactaccaaattaaaaaagcaaaatcagaaacagagctgacgagagagctgacgaagcttgcggcgaaaaataaagacgctgttacatatgcatcttttctgggcgcaggagtgtacgatcactaccagccggttatcgtcgatcatgtgatatcccgatcagagttttacacggcatatacgccttaccagcctgaaatctcacaaggagagctgcaggcgatttttgaatttcaaacgatgatctgtgaattaacgggaatggatatcgcaaactcctctatgtacgacgggggaacggcgctggcggaagcggcgatgcttgcgtcgggacatacgaaaaagaaaaaaatcgtcatttccgcagccgttcatccggaatcgcgggatgttttgaaaacatacgcaaagggccaatatattgaggttgtagaggtgcccgtgaaaaacggcgtcacagatcttgaagcattggaacatgccgtttgtgatgaaacggccgccgtgatcgtccagtatccgaacttcttcggacaaatcgagccgttaaaggacattgagccgctcgcacataaaggaaacagccagctgattgtttcttcaaacccgctcgcgctcggtattttgacaccgcccggggcatacggagctgatatcgtcgtcggggacgcgcagcctttcggcatacctgcggcgttcggcggcccgcactgcggctattttgcagtaacgaaaaaactgatgagaaaggtgccgggccggcttgtcggccaaacggaggatgaaaacgggcgaagaggttttgttctcactcttcaggcgcgcgagcagcatatcagaagagacaaagccacgtctaacatttgttcaaatcaggcgctgaatgctttagcggcttcagccgcgatgacggcgctcggaaaaaacggcgtcaaagacatggcccgccaaaatatattgaaagctgattacgcgagacgccaagcggaaaaagccggcttgcacgtagcatttgacggcccgatatttaatgaatttgccgtcaggctgaatcttcccgtcaaggaagcaaaccggcggctcctgcaagacggcataatcggcggatatgacttaggccttgcgtatccggaactgaatcagcatatgctcattgccgtcacagagctgagaacaaaagaagagatcgattcgcttattgcgggattgggggatcaacatgaataatcaagatcaggcgcttatttttgaaatgtcccgcgaagggcgtatcggttacagccttccggagcttgatgtgccggaaacagagcttgaaagccttcttcccggtgactatatccgcgatgaagacgcaaagctgccggaagtatcagagctcgatattatgcggcattataccgctctttctaagaggaaccacggagttgattcaggcttttatccgctcggctcctgtacgatgaaatacaatccgaaattaaatgaaaaaattgcccggatcgcaggtttttccgccattcatccgcttcaggacgagggcacggttcagggggcgcttgagcttttatacgatttaagcgggcacttggaggagattacgggcatggacgaggtgacgctgcagcctgcggcgggcgctcacggcgaatggaccggcctgatgatgatccgcgcctatcacgaagcgcggggagacttcggacggacgaaggtgattgtccctgattcagcccacggtacgaatccggcatccgccacggtcgccggttttgaaacgattaccgtcaagtcaaatgagcacgggctggttgacattgaagatttgaaaagagcggtaaacgaagaaacagcggcgctgatgctgacgaatccgaacaccctcgggttatttgaggaaaacattacggaaatggctgaaatcgtccatcaggccggcggaaagctttattatgacggagcgaatttaaatgccgttttaagtaaagcaagaccgggagatatgggatttgacgtcgttcaccttaatctgcataaaacatttaccgggccgcacggcgggggaggaccgggctcaggtccggtcggagtgaaaaaagaattcattccgtatctgccgaaacccgttctcacgaaaaaagagggccgtttgacttttgactatgatcggccgcagtcgatcgggcgcgtaaaaccttattacggcaacttcggcattaatgtcagagcctacacgtatatccgttccatggggcctgacggcttaaaagctgtgaccgaaaacgcggttttaaatgcaaattatatgatgagaagactcgcgccttattatgacctcccgtatgaccgtcattgcaagcatgaatttgtgttatcgggaagaaggcagaaaaagctcggcgttcgaacgcttgatattgccaaacggcttttggatttcggctatcatccgccgactgtgtattttcctctcaatgttgaagaaagcatcatgatcgaaccgacggaaacggaatcaaaggaaacgctagatgcgtttatagatgccatgattcaaattgcgcgggaagcggaggaatcgcctgaaatcgttcaggaagcgccgcatacaacagttgtcaaaagaatggatgaaaccaaggcggcaagaaagcccgttttaaaatacgaacgtacacttgacggcagccgctgacacggtgtaaaaaaaagagctgtccgttttatacggaagctctttttttatgattagttttttgctttaatttttccgccccattttttaaatccgcctttcaggttgtaaatatctttacagccgtgtttgcggagcgtctgtgccgcgcgtccgctgcggacattgttttggcagtacagataaacgggtttatcaggacggatttcacttttgcgctgtttcagctgtgacagcggaatgttgcgcgcgccgagaatatggccgccttcaaattcattcggttcacggacgtcaatcagctgcgcttttctgtagcccgcgcggaattcctcttccgtaagtgttttcattaaacgctgctggtaaaaatacgacacgatcatataaacgataaacgccgcaacaataattaaagcaatcatattagacaatgcgattctactcctttaacttataaaatcaaaaccctgcttcctgaaaacaaggcttaccggacgttttgggacaaatactattatagtaaagcatgaagcgattgtcatccttaatgaaacgaaatatttttcattttcaaggcagtttgttaaactgattttattaaaacgataaagaagggttcagtgtatggaaaaagaaacatggcggtttattgactcagggaatgaaagcccggcatttaacatggcgctggatgaagcgcttttatattggcacagccaaaaaaaaattcctccggtgatccgtttttacggctggaatccggcaactttgtctgtcgggtattttcaaaatattaagaaggaaattaactttgacgcagtacataaacacggcctcgggtttgtcagaagaccgacaggcggacggggtgttctgcatgataaagaattgacatacagcgtaatcgtttcagaggatcacccggaaatgccggccacggtgacagaggcgtaccgggtgatttcagaaggtattctgcagggattcagaaaccttggacttgatgcctactttgcgattccgcgaacggagaaagaaaaagaaagcttgaaaaatccgcgctcgtccgtctgctttgatgcgccttcgtggtatgaactggtcgtcgaaggacggaaagttgccggaagcgcacagacacgccaaaaaggcgtcattcttcagcacggttccatcctgcttgacattgatgaggataagctgtttgatctgtttttatatccgagcgacagagtccgtgagcgcatgcagcggaatttcaaaaacaaagcggtagccatcaacgccttagcgccgaaacgggtaacgatggatgaggccagaatcgcttttaaagccggttttgaggaagggctgaacattcatcttgagccttacacactcacgtctgaagagcttgcatttgtcaatgagctggctgagacgaaatacgcgtctgatgaatggaattataagcgctgataaggcttgacagaccggaagcatccttgttttttcatgaccgttagtgtaaacttgtaatggtttataaagttaaggtgctttttgggagggttacttatgacaacaccaagtatggaagattatattgaacagatttatatgctgatagaagaaaaaggatatgcacgggtttctgatatcgcggaagctttggcagtccacccctcctctgtaacgaaaatggttcaaaaactagataaagacgagtatttgatttatgaaaaatatcgcgggctcgtattgacgtcaaaaggcaaaaagatcggcaaacggctcgtatacagacacgaattgcttgagcagtttttaagaatcattggtgttgatgaagagaagatttacaatgatgttgaaggaatcgaacatcatcttagctggaacagcattgaccgcatcggcgacctcgttcagtatttcgaagatgacgaaagccggaaaaaagaattgaaatccgtacagaaaaaaaccgaaaatcccggtgaataaagggcagcccgaaatggggcgccctttttttaatgtcttcattctttggtctatttcgcccagccgtttcttaaaataataatacaccttgagatggaagggagagggcgcgctatgcagattgacggcgtattttcgggcggggggataaaaggggtggcgcttgccggcgcttatgaagcgctggaagaaaagggctttcgctttgaaaggctcgccggaacaagcgccggcgcaattattgccgcatttatcgctgcgggctatacgagcagagaggttcattccatcatagatgaggtggacggaaggcaattgcttgatcagagatactcattcctcccgctgaaaatcctgcggtgggtgtcgatatattggcgcctcggactatacagaggcgatatgctggaaaaatggattgcggataaattaaaagcgaagggcatcattgcgttcggcgatttgaaaaaaggctcgctccgtctcatcgcttcagatctgacgaacggaacgatgatcgtgcttcctgacgatcttccccgctacggattaaatccggagatgttcccggttgccagagccgtcagaatgagctgcagcattccttatttttttgaaccgataaaactgaagaccgaaaaaggcacctcaacggtcgttgacggcggcgtgttaagcaatttcccgatttggctgtattcaaaagaacgcaaacggccggtcatcggaatttcgctttcgcccaacgaaaaagagcgcccgaaaaaatcaatccgcaacgcttttgagctgttcggggctttgtttgaaacgatgaaagacgctcatgatgccaggcatatcgcgacaaagtacgaacagaatattatttttattccggtggaacatgtgatggcgacggagtttcatctcacaccgcaaaaaaaactagctctcattgagctaggaaaaagcagaacagagcaatttttgaagcaatggagctattaaaaaagcgctctgtttttctttttattctttttgccttctatgacggtaagctgggtctggctttttttcttaagaatcatcggcttcggtctgctgctgctcggcacgctccgcaaatggctgacccggcctctgtgtccggcgcggtgcttcgctttttgctccttcattcggagccgcgattgtctggccgcttttctgaaagcggttccgtcacggccggtgcggcggttcaggaccgtcctcacgataaaataaataatgatgcctgcgataataacggtgatcgctcttgaaatcatctgcccggggttggttaccgctgcataaatgaaaccgaatgcgccaagcgctatcaatacagcaaaaaaaggttgtacacgatgattcataactgcccacctccaaaataataacggtaactgttcagattacgttgtgagacggcttttcgctctgttctgaaatgtcttccagtctgagaagctcgttaaagctttctatggcaacctcgacctggtcatccgccggttcctttgtcgttaaaagctgcagccacaggccgggataaccgagcactttcaaaacggggatattccgcactctgttcgtcagctggagcacttcaaaggagatgccgagaacgaccggtataagcgcaatcctgtctaagatccgcacccaaagcggatctgtcggaacgagtaaatagatgaacatgccgacaatgatcgtaaataaaataaagcttgaaccgcaacggtaatgaagccgtgactgcttctgaacattttctattgtaattggcaaattctgttcataacagtttatgaccttatgttcggctccatgatattgaaacactcttttaattaacggcgtcattgataaaaaataaatgtagccgagaagcagaataagcttaaacagactttcgattccgatctgcgcggcgtctgaggaaaagacgggccttacaagctccgctaagaagaccgggacgagcgtaaaaacgaatttgctgaacaaaaacgacagaacgccgatcaccgccaggctgaaaaacatcgataagcccgaacccttcttatcttcctgctccagcttggcgtcatcttgaggatcaagcccgtaacgttcgctggaaaagtttaaatgctttgtgccgttggcgctcgcctcaatgatggcgacgattccccgcaaaaaaggaatcttttttaaagccgaaagcttggcgttcggcactctcggaagcttgaaaaaatcaatgcttccgtcattcctgcggatggcggtaacataattttttctgccgccgaacatgaccccttcaacgacagcctgcccgccgtaagcagggggcgttttttgtttggacattgtttatcaacctgcctgtttttttaggatttactaaccatttcctttcactctattgtacaggaaaccgcggtaaacctctagttagacagccggaaaatcaatgctttttctacatgcagtataccccgtttctttagattttactcattgaatgaaaatatggcgcagttttttatgacttttcaattttggggcagtctatgactggaggtgccatgatgacaagcgaaaaacattcagaacaggaagaaaaaaagaagcaggatgatgatcagcagcctgtttcatttaccggcagaatttgcggtatcggatttgccggcggtgtattttggagtttgatcggctatctcgggtatgtctttcatttttcagagatcagccccaacatgattcttcagccgtttatgattggagaatggaaaaaacaatggctcggcacgatggtcagcatcgttgtcatcggattcatttcaattgccggggcgtttatttatttcgtctgcctgaaacgttttaaaaccatgtggccggggatggtgtacggcgtcattttatggtgtgcggtttttttcttattcaatccgattttcgaagatgtgaaatccgtcactgaattgaaatcagatacaatcgtgacgacgctttgcctttacattctgtacggtttgtttgtcggttactcaatttccttcaactacaatgaacttacgtcagacaagcttgcaagggcgctcggcaacaagtgaataagtgtataatccctgtccggtatggtaaaatgttcacgagaagtgaacattttttatgctgaaaaccgggcggggatgctcccgcgttgtcaggcggcagtcaagaatcggcgaggaggagaaagggaatgaaacttgagaaattgcgaaatcttttcggtcagctggatatagacggaatgttggtgacaagctccgccaatctgcagtatatgacgggatttacgggttcgtcaggccttgcggtcatatcgaaagaacgtgcggcatttatcacggatttccgttacaccgagcaggcgaagacgcaagtgaagggttttgacattatcgagcacggcggaagcttaatccaaacggctgcggatacgattcttgagtacggcattaaaaaactcggcttcgagcaaaacagcatgacgtacggaacatatgcatcctaccaagcggtgctgcaggaagcggagatggttcccgtcgcggattccgttgaaaagttgcgcttgattaagtcaagtgaagagattaagatattagaggaagctgcgaagattgcggatgatgcgtttgaacatattctgacgtttatcaaaccgggcatctcagagatttcagttgcaaacgagcttgaattttatatgagacgtcaaggagcagacggctcttcctttgatatgattgtcgcctcgggagtcagatccagccttccccacggagtggcaagcggcaaattgattgaaaagggagacttggtcacgctcgatttcggcgcttattataaaggctattgttctgacatcacacgcaccgtcgcggtcggagagccaagtgataaactgaaagagatttatcaggtcgtatacgatgcccaagcgcttggtgtcctgcatattaaacccggcatgacgggaaaagaagcggacgccctgacgagggatcacatcaccgcaaaaggctacggacagtatttcggccattcgacaggacacgggtttggaatggaagtccatgaatcaccggggctgtctctcaggtcatcggccgttcttgagccgggcatggcggtaacggttgagccgggcatatacataccggaagttgggggcgcaagaatcgaagatgatatcatcatcactgacgacggcaaccggacaattacgcattcccctaaagaattaattattttgtgatcggaatataggaggacatcaaacatgatttcagttaacgattttcgtacaggactaacgattgaagtagacggcggcatttggcgcgtcgttgacttccagcacgtaaagccgggaaaaggagcggcatttgtccgttctaaattgcgtaacctgcgcacgggcgctattcaggagaaaacattccgtgcaggtgaaaaagtcgcgaaagctcaaatcgaaacaaaaacgatgcagtatctttatgccaacggcgatcagcacgtgttcatggatacaagctcatatgaacagcttgaattgaacgaaaaccaaatcgaagaagaattgaaatatcttctggaaaatatgtctgtgcacatcatgatgtatcagtctgaaacgctcggtattgaactgccgaacacagttgaactgaaagttgttgaaacagagccgggaattaaaggcgacacggcgtcaggcggcacgaaacctgccaaaacggaaacaggtcttgtcgtaaacgtaccgtttttcgtgaacgaaggcgatacgctggttgtaaatacatcagacggctcttacgtgtcaagagcgtagtcaaagaaattcggagtctgctccttttacggggcaggctttttttgcgttctgcctgaatctttcttctatatgaaaatagtgagactacttccgtcagctagagcatatagtgtaacaaaatgcttgaagttgggggattgcaatgaaatttttgtttggttcaatcaattctactgttttaacgatggccggtttacgagttttgtcctcgctcattgaattatcggccgctattatcatgcttttgacaaacgacatcagaaaggcggttgtggtgaatagtattttggcaatcgtcggcccgctgatctttatcatcacaatgacgatcggcatttatcagattgccggacagctctcatatgcaaaattaatattgatttttgcgggagtggtgctgattttggccggtgtgcataaatagagggccggggtgtcataaagtctgtcccggatcatacattttaaagaagccaatcggtaaaaaaggaggagactctattgaatgagattacagaggttctccctgaattattgagagatgccatctccgccgtgcccgaagaagcgaggcgggatacagaagaaatcagaatccgcgtcgacaggccggttgaactgatccaaaaaggacaacctttgtatttgtcatatgtctgtacggccggcgacgcacagctgatcctcagccggctcagcaattacagtatgtacacgctggaagaagagctgaaaaaaggatatatcacaatcagaggaggccaccgcgtggggctggccggaagagtcatcgtcgaaaacggagccgtcaaaggactccgggatattacttcttttaatatccgaatcgcccgggagaagctgggaatcgcagaaccgctcattcctttcttatggaaagaaaactggctgaatacgctgatcatcggtcctccgcaaacggggaaaacgactttgcttcgtgatttggcccggctttccagcaccggatcaaaacgcattcccgcaaaaaagacaggtatcgtagatgaacgttcggaaattgccggctgcctgcggggcattccccagcacagtttcggccgcagaatcgatgtccttgatgcctgtccgaaggcggaagggctgatgatgatgattcgctctatgagtcctgatgtcataattgtggatgaaatcgggagaatggaagactcacaagcgctgctggaggcgctccatgcgggcgtatccgtcatcgtatctgcgcacgggtggaatatgaaagacttggtcaagaggccgtcgctgaaaatgctttgggaggaaaacgtgtttgaccggtatgttgaactgtcaaggcgccgcggtccgggaacgatcagcaggatgtacggaaaggatggggaacctgttccacatgctgaaagcgtgatgacatgctgaagcttttgggtgccgtgtttattctgacagcgacgacttggaccggatttgagatcgccaaaatgtatatagaaaggccgaggcagatccgtcagctgcgcgcggcgctccaatcgcttgaagcggaaatcatgttcgggcatacaccgctgcataccgcctcgggacaaattgctgcacagctttccaaacctgtatcgttattgtttcaagctttcagcagaaggctagagcagggaagcgattccgccaaaacggcttgggaacagagcttgaaaaataactggtcgtccatggcgatgaaaaaaagcgaatatgatgtactaaagcaattcggagagacgctcgggctccatgaccgtgtttctcagcagaaacatatcaagcttgcgcttacacatttggaagcggcggaagcggatgccggacgggcgcaggcgaaaaatgaaaaaatggtgaaaagcttaggatttttagccggactgttactcattcttctattgatgtaaacatgaggggagcaaacataaaatgggagtcgacgtaaatgtcatttttcaaatcgccggagtcggtatcgtggttgcgtttctgcacaccatacttgaccaaatgggaaaaaaagaatacgcccaatgggtgacgctgcttggctttatctatattttatttatggtggcgacgattgtcgatgacctgttcaaaaagatcaaagctgtgtttctattccaaggataggggggcttacagattgagattgttcaaattgtaggtttaggcctgatcgccacatttctctccctgatcgtaaaagaacagaaaccgactttcgcgtttatgattgtcgtcttcagcggctgcgtgatctttctttatctcatcgaccagatttacgacattatcagaatgatagaaaaaatagccgtcaatgcaaatgtcaatatggtctatgtggaaaccattttaaaaattatcggcatcgcctacatcgctgaattcggagcgcagctgacaaaggatgctggccagggagcgattgcttcgaaaatagagctggccggaaaaattttgatactggtaatggccgtgccgatactcaccgtcattattgaaacgattctcggacttattccttcttgatcataaataaaatggaaaggggggcacaaaaaatgaagcgctttcggtgggcgggagcttttttgttcatcctcttattttttcagactgaatgtgtacaagctgccggaacagacggtgcatcgcaggaaaccgcagttcaccaagaatccgctgatgaagtggcgaaaaagcaggccgaagcgctgaaaacagaaggcatcggaaagttttgggacgacatcatgacagaatacggcggtcttctgcctgaaagccaaaagggaagcatcatcgactttattaacggagaaaaaacgttctcaccggaggcatggctgaaggctttattttcatacttgtttcatgaagtgctcgcaaacggaaagcttctgggaactttgattcttctcaccattttttgtgtcattctgcagctcctgcaaaatgcgttccagcagagcaccgtcagcaaagtggcttatgcaatcgtctacatggtgctgattattctcgctttaaacagctttcatgttgccgtcaattatgccagtgaagcgatccagacgatgacaagcttcattctcgcgctcatcccgcttttactcgcgcttttggcgtcttccgggggagccgtctccgcagctttttttcaccccgttattttatttctgatgaatacgagcggccttctcattcaaaacatcgtcatgccgcttatcttcctgtcagcgattttaagcatcgtcagcacgatgacggatcaatataaagtcacgcagcttgccaatctgctcagaaatatcgcgatcggcgcgcttgccgtatttctcaccgtgtttctcggcgtcatctccgtacagggggcttcggctgccgtgacggacgggattacgctcaggactgcaaaatttataacaggcaattttattcccgtactcggccggatgtttacggatgcgacggatacggtcatcagcgcctcgctcctattaaaaaacaccgtgggaatcctcggagtcggaattttgatctgcatctccgcgtttccggcgatcaaagtgctctcgctcgcttttatttataagctcgcggccgctattctgcagccgctcggaggcgggcccgtcattacgtgcctcggcgtcatcagcagaagcgtactgtatattttcgcggcgctcgccatcgtctctctcatgtttttcctcagcatcacagtcattattacagcaggcaacctcactatgatgatgaaataaaggaggcccattggatatgagctttttaacagaatggctgacaagcattattttatttatcttattcgccatcgtcatcgacatgctgctgcccagctccagtatgcaaaaatacgcaaagatggttgtcagcctgctgttaatcattgtcatgctcaacccgatattcaaacttttcaaaacagacccggaaatcatcttcgattatttgacaaaacaagagcaatctcaatccgctgatataaaaaatcaaattaaatcagaaaaaaaagaaatacaagcatcaaaccgcgcatatgttttagaagaaatggctgtccaactaaaaaagaaagcggaggagatgttcagtcatgacgaatacaaaatagacgacatccgccttacagcggaagaacaggttcgttcagaagaagatgtaaaaacgatcagcgtgtatatggccccatcttctgaaaaaaccgtgcaaaccgtcgcaccgatcgacatccgcacagaccgcaaatacgaaccggaaggcgcagccgacaaaaaagaggccgcagacatcaaagaaaaacttgcggatatatgggaaatcggcagtgagaaaattacggtttatatggaaggcggggagaaaaacggccatgaataaaaacggactatggaccatactcaaaaaacagctgatgatcggacaggcgaaagacggagaaaaaccaaaactgacaaaatatcattactttctgttcgtgtttgtgctcggggtatcttttatgctggtcagccagctgttctcttcaccggagaaaaccgggaaggaccaagcggtgcagaccgtcatgtccggccgaacggaagacaaaagcgggcaaaaaagcgcacccgtttttaaggcatcgaaagacggcagcgcaaaaaccacgatcgatgattacgaaagagactatgaaaaccagctgaaagaaatccttgaaacgattatcggcgtggaggatgtctcaattgtcgtaaacgtagacgcaacatctttgaaagtgtttgagaaaaataaaacgaaaaaagacaccaccactgaagaaaccgataaagaaggcggcaaaagaagcgtaaccgatcaaacctctgaagaacaaattgtcatgattcgaaacggggatcaggaaaccccggtcgtcgtccagacgaaaaagcccgatatccgcggtgtactcgttgtcgctcagggagtggacaacgttcaaataaaaaaaaccatcattgatgccgtcacaagggtgcttgatgttccgagctaccgtgtagcggttgcccctaaaaaaatcaaggaggattcataaatcatgctgaaaaaacaaacggtttggcttttaacaatgctcagtctcgtcgtggtattaagtgtttattatattatgtcgccggaaagcaaaaatgccgtgcagatgaaaagcgaaaaaagcagcggagaagtcgccactgaaaaaacgccggctcctgaaacgaaagataagagcggaagcggcacggaaaaagaagacggcacaaaaggaacgaaagattctaaaggcacaaaagaggataaagaaacatcagccgaagcatcggacaaagacggatcggtcgccacagaaacagctgatgaaaacttatttaccgcataccgcatggagcttgaagacgcgagaagcaaagaaagggaacagttaaacagcattgtttcaagcgatgatgcgaccgcaaaggaaaaaagcgaagcctacgataaaatgacggcgctgagcaatgctgaagggacggaaaaacagctggaaacgctgattaaaacacaaggctacaaagatgcgctcgtggatgctgaaggagacaaaatcaacattaccgtcatgtctgacaaacattcaaacgcaaaagcttccgctatcattgacctggtggaaaaagaaatcaagacgatgaaagacgtcgccgtcacgtttgaaccgacaaagtaagagacctgaaccgcccgcacccgctgcgggcttttctgatgtcattttagatcagtgttgaatttacacaagcgctcctgtaagataaacatagtatgtacttttagtagcaacccataaatttctattttttatacataggagtggaaactgatgttaaaaatcaacgaaattcatgaactgataaaaagaatcgatgaatcttccatcgacgaatttgtttacgaaattgaaggcgtaagcctcaaactgaaaaaaaatgaagcgccggcagtgaatgtaacgggacaagcccaagccgttcccgccgcttacgcacctgctccgcaggctgcaaaaccggaagcgagtgaagccgctcctgctcaggaagcgccgaaacaagacgaaaacctgcacaaaattacgtctccgatggtcggaacgttttatgcttcttcatcgccggaagccggcccttacgtaaaccaaggttcaaaagtgagcgaaaatacagttgtttgtatcgtagaagcaatgaaactctttaacgagattgaagccgaagtaaaaggagaaatcgttgaagtgttagttgaaaacggccagctggtcgaatacggacaacctctatttcttgtaaaagctgagtaaggagacctgctattatgattaaaaagctattgatcgccaaccgaggagaaatcgccgtcagaatcatccgggcctgcaaagagctgggcattgaaactgtagccgtttattctgaggcagataaagacgccctgcatgtccaaatggccgatgaggctttttgtatcgggccgaaaacatcaaaagaaagctatttaaatgtaacgaacatcgtcagcgtcgcaaagctgaccggcacggatgcgattcatccgggatacgggtttttagctgaaaacgccgactttgccgagctgtgcgaggaattaaacgtaacgtttgtcggccctacggcggacgccatttcaaaaatgggaacaaaagatatcgcgcgcgacacgatgcagctggcgggcgtgccgattgtgcccggttcaaaaggaatcataaaaaatacggaagaagcggtttcgcttgcaggtgaaattgggtatcctgtcattataaaagccactgcgggcggaggcggaaaaggcatccgggtcgcacgcacagaagaagaactgatcaaaggcattgagattacccagcaggaagccgctacggcattcggaaatccgggtgtgtacatcgagaagtacatagaagatttccgccatgttgaaattcaggtgcttgcggataattacggaaacacgatccatctcggagagcgtgactgttctatccaaagacgtctgcaaaaacttcttgaagagtcaccgtcacctgcgcttgattctgaaatcagggagcagatgggtgaagcagcggtaaaagcagcgaaggccgtcggttacacgggagccggcacagtagaattcatctatgactacagagaacagcgctactacttcatggaaatgaacacgcgtattcaagtagagcaccctgttacagaaatggtgacgggaacggatctgatcaaagaacagatcaaagtggcatccggacaggagctttcgctcagacaggaagacgttgaatttaacggctgggcgattgaatgccgcatcaacgctgaaaatcctgcgaaaaacttcatgccttcacccggtaaaattaacatgtacctgccgccgggcggactcggtgtacgcgtggattcagccgcatatcccggctactcgatcccgccgtactatgacagtatgattgctaaagtcatcacatacggaacaacgcgtgatgaggcagtcgcacggatgaaacgcgcgctgagcgaattcgtgattgaaggtattgagacgacgatcccgttccatttgaaactgcttgaacacgaaacatttgtcagcggagagtttaatacaaagtttttagaaacatatgatgtaatgggctcataatttttgcgggaggtgaattgaatggaagacaacagtgtgcttaaaatggatcatgatgaggctcatttaggcaaggttgaaattgctcctgaggtcattgaagtcattgccggcatcgccgcttccgaagttgaaggagttgctgaaatgcgcggcaatttcgccacgggcgtcgtagaacgcttcggcaaaatcaatcacggcaaaggcgtaaaggtcgatttagccgatgacgggattaccatcgacgtctattgcgtcgttcaattcgggatctcgatcccgaaagtggcggcaagcgttcaggagaatatccgccaaaccttattaaacatgacgtctctgaccattaatgaaatcaatattcatatcgtcggcattcaatttgacacgaaagcccaagaagtcgaaatcgacgaagaaatgtaatgagcgtataaaaaccaaggggatgggcagccctttggttttttatacgtttcccgtcatttcaggcatgaagaaagccggcttacaaacggcagccgagtttcttcatgctgtgaaatccgaatgaaattaatacggtttgtgaaaatattcggcattagggtgaaaaaacctaaatttcgacatgcgattgagaaaaaaatatgttatgatctctttaagcttaacgacaagcggataaagcggatctgaaggagaaagaaaatgaaaagaagaacagctagagaaaaagctttgcaggcactttttcagattgatgtcagcgatattgcaccgaacgatgccattgagcacgcgcttgatggtgaaaaaacagatgccttctttgaacagctggtgtacggagtgatcgaacatcaggttcagcttgatgaaatgatttccggccatctcgtcaattggaagcttgaccggattgcaaacgtagaccgcgcgatcctgcgtctggcggtgtatgaaatggtttattctgacgacattcctgctaacgtgtcattaaacgaagcaatcgagctggcaaaacggttcggcgacgataaagctgcaaaattcgtaaacggggttctttctaacattaaaactgatatcgaatcataggaggaaagaaaatgactgcaacaatcatcgacggaaaagaaacggctaaagaaaaacgcgaacaattggcaaaagaagtagaagagctgaaagcacaaggcgtagtgcctggattggcggtcattttaatcggagacgatcccgcttctgtttcatatgtgacaggcaagaaaaaagccgctgaaacaatgggaatgaaatttaagcttgaccgctttgactcaagcttaaccgaggcggagcttttaacagtgattgatcagtataatcaaaatcccgaattccacggcattctcgtccagctgccgctcccggatcatatttctgaaaaagccgtaatcgagcggatctcccctgataaggatgttgacggtttccaccctctcaacgtcgggaaaatgctgcttggcgaagatacatttcttccatgcacgccgcacggaattgtcgagttattgaaaaagacgaacgtagatctttccggcaaagaagttgttgtagtcggacgaagcaatattgtcggtaaaccggtcggccagctgctgctgaacgaaaacgcgaccgtcacatattgccattcccggacgaaaaatatgtctgagcatacgaaaaaagcagatattctcgtggtagcggtcggtaaagcgaacttcatcaaagccgatcaaatcaaagagggcgccattgtcattgatgtcggcgtcaaccgtctcgaaagcggaaaactttgcggagacgttcagtttgatgaagcgaaagaaaaagcatctttcattacgccggtgccgggcggagtaggtccgatgaccatcacaatgcttgcgcataatactgttaaatctgccagacgtacgttatcatagataaccggagacagtcacaaaaagtgtgacaatgagcacgatacccgcttcttaaggctcctttcagccagagcgggttttcttagtttagggcaaaaagcctttatgaaaggagtgcaggatgtgagtgaagcggcatatgtcacggtttccgcgctgaccaaatacattaaacgaaaattcgatgtggaccctcatcttgaagacatttggattaagggtgagctctccaatgttaaaattcatacgagaggccacatctattttacattaaaagatgagcatgcccgcatgcaggccgtcatgtttcagaggcaaagttcgaggcttgcgtttaagccagaagacggaatgaaggtcatcgtaagaggcggcatctccgtctatgaaccgagcggaagctatcagctgtacgcgaaagaaatgcagccggacggtgtgggggcgctctacttagcatatgaagaattaaagaaaaaacttgccggcgaagggttgtttgatgaccggcataagcaggccatccccgcttttccggccacgatcggggtcgtcacgtcaccgacgggagcagccgtcagagacgtcattaccacactcaaaagaagatacccccttgtgaaagtcattgtgcttcccgcgctcgttcaaggtgaaaatgccatcagatcgattgtgaagcgcattgaagaagccaatgcacaaaaaatgtgtgacgtcctgatcgtcggaaggggagggggctcgatcgaagaattgtgggcatttaacgaagaaatcgtggcccgggcgatttttgcttccgccattccgattatatcagcggtcggacatgaaacagattttacaatcagtgatttcgtcgcggatatccgggcggcaacgccgacaggagcggcagaaatcgccgtcccccacacgacggacttaatggaacggacaaaaacggcggaagtccgcctgacaagagcgatgcagcagcatatcagcaagaaaaaagaacggattcaatcgctacagtcatcctacgcgttccgttttccgaaacgattgtatacccaaaaagaacagcagtttgaccttttgtatcagcagttccaatcacagctcacagggcttacggacaggaaacaaagacagctggagcggaatacgtacagattaacggcgctccaccctgaaacccagctgaaacaggcgaaaaaacggtacgaggagcgctcaaatcagctcgcccgaagcatgaatgtccagctgaagcagcttcattcgcagtttcagacggttcttggtaaactgaatgcattaagtccccttcaggtgatggagagaggatacagtctggcctataaagacaaagagctgatcaaaagcgttgatcaagtggaacaaaatgatacgcttgaagtaaagatgacagacggcgttctgacgtgtgaagtattgcaaaagagaggcgaacgataatgacagaaaccaaaaaaagtgaagagctgacatttgaagaggcgatgaaaggccttgaaggcattgtggcaaagcttgaagaaggagacgtgccgctggagcaggcgattaattattttcaggaagggatggccctttcaaaaatgtgccatgaaaagcttcagcatgtcgaaaagcaaatggactttattttaaaagataacggcgaacttgcacctttcagcgttcaggaggaagacgaaggtgacaaataaactggacgcatttttagcatcgcgcaaacaactgattgaacagcagctttctttgtatacagaacggcttgcgatgccggaaaccctcaaaaaatctatgctgtattctttggaagcgggcggaaagaggctgcgccccctcgtcgtcttagccgttctgaatgcttacggaaaagatgaaaaagacgggattccggtcggatgcgctgtcgaaatgattcatacgtattctttaatccatgatgatctgccttgcatggacgatgatgatctgcgccggggaaagcccacaaaccataaagtcttcggagaagcggcagccgtattggccggagacgggcttctgacagaaagctttaaactgatcacatctcatgtgtctgaggcggtttcagcagaaaaacggctccgtctcgtcgatgagctgatcagcgcggcgggaacggaaggaatggtcggcggacaggctgccgacatggaagcggaacaaaagcggataacgcttgaggagctggaatccatccacgagcggaaaacggccaagctcctcggtttttccgtgacggcgggcgccattttggcagatgcgccggaggatgaagtcgaaaagctgcgtctgttcagcagccatatcggcatcggatttcaaatcagagacgacatccttgatattgaaggacatgaggagaggatcggcaaaccggtcggctcagatacgtcgaacgaaaaatcaacgtatccgtcgcttttaacgcttgaaggcgcgaaagaaaagcttgcgtatcatatcagcgaggcgaaacagatcatcagcggcctttctcttcagaaggaattgctgcatgacctctgtgatttaatcgcggcgagagatcattaaaaacggtcctgatttgaaggggctgccgctcctatggtaaaatgtaagcagtttcgatgaaaatacaaagggagtctttttcttttttcaaaaagacactgtttaatttgcagaaattcatgctgaaagtgagttgatccgctttggatcttttatcaatacaggacccgtcatttcttaagaagatgtcaattgaacagctggaagagctgagtgaggagatccgcaatttcctcatcacatcgctgtctgcatctggcggccatatcgggccgaacctcggggttgtcgagctgacaattgcgcttcacaaagaatttgacagtccgaaagataaatttttatgggatgtcggacatcagtcctatgttcataaactgttaactgggcgcggcaaggagtttgaaaccttgcgccaatataaagggctttgcggtttcccgaaacgcagcgaaagcgaacatgacgtatgggaaacaggccacagctcaacctcgctctcaggcgcgatgggaatggctgccgctcgtgatattaaaggatcgaaagaatatatcatcccgattatcggagacggcgctttaaccggaggaatggcgcttgaagcgctgaaccatatcggtgatgagaaaaaagacatgatcgtcatcctgaatgataatgagatgagcattgcgccgaatgtcggggcgattcattctatgcttggacggcttcgcacggccggcaaatatcaatgggtaaaagacgagcttgaatatttatttaagcgcatcccggccgtcggcggaaaattggccgccacagctgaacggataaaagacagtttgaaatatatgcttgtgtcaggcatgttttttgaagagctgggctttacgtatttaggcccggttgacggtcattcctaccacgaactgtttgaaaacctgcaatacgccaaaaaaacgaaaggccctgtccttttacatgtcattacgaaaaagggcaaaggctataaaccggctgagaccgacacaatcggcacatggcacggaacgggtccgtataaaatcaatacgggtgatttcgtcaagccgaaagccgcggcgccttcatggagcggacttgtcagcggcaccgtgcaggagctggcacgtgaggatgacagaattgtcgccattacaccggccatgccggtcggctccaaactggaagggtttgcgaaagaattccctgaacgcatgtttgatgtcggaatcgcagaacagcatgcggcgacgatggcggctggaatggcgcttcagggtatgaagccgtttcttgcgatctattcgacctttttgcagcgggcgtacgatcaggtcgtccatgacatctgccgtcaaaacgcgaatgtgtttatcggcattgaccgcgccggtttggtcggcgctgacggggagacgcatcaaggcgtctttgacatcgcctttttgcggcatataccaaacctcgttttaatgatgccgaaggatgaaaatgaaggccgccatatggtcaatacagcccttaattatgaggagggcccgatcgcgatgcgcttcccgcgcggaaacgggctcggcgtaaagatggataaagagctgaaaaccattccgatcggaacatgggaagtgctccgtcccggaaaagacgcggtcattttaacattcggtacgaccattgaaatggcgctggaagcggctgaagaactgcaaaaagaaggcctgtccgtgcgtgtcgtgaatgcgcggttcataaaaccgattgataaacaaatgatgaaggccattcttaatgaaggtctgccgattttaacgatagaagaagccgtgcttgaaggcggattcggcagcacgattcttgaatacgctcatgacctcggcatgtatcatacaccgattgacagaatgggcatcccagaccggtttattgaacacggcagcgtaaccgccctgcttgaagaaatcggtctcactaaggttgaggttatgaaccggatcaaactgctgatgccgccgaagacacataaaggaattggatcatgacagcaaaaaaagaacgattagatgtacttcttgtagaaaaaggccttgcggaaacgcgggaaaaagcgaaacgcgccattatggcgggcatcgtatactcaaatgaaaaccgattggacaaaccgggtgaaaaaatcgcccgggatcttccgttaacggtaaaaggaaaccctcttaaatacgtcagcagaggcggattaaagcttgaaaaagctctggaagtgtttcccgtctcggtaaaaggaaaaacgatgattgacatcggctcgtctacagggggattcacggattgcgccctccaaaacggagccgagcggtcctacgcagtggatgtcggctataatcagcttgcttggaagctcagacaggacgagagggtcgtcgtcatggaacggacgaatttccgctattccgagccttccgatttcacagagggtttgccggaatttgcgacaatcgatgtttctttcatctcactccgcctcattctgccggttttaaaaacgctgcttgtaccggggagcgattgtatcgcactggtgaagccgcaatttgaagccggacgggaatccgtcggaaaaaaaggcattgtcagagatcccggtgttcatactgacgttctccgccgcatgaatcaatttgccgcttctgaaggatatacagtgaaaggactgtccttctcaccgattacagggggagacggcaatattgagtttctgcttcatttggaatggggcggagaagacggaaacggcgctgaactgccggaagaagacattctccgtaccgtccgcgaagcacatgagacattaaaagccaaaaagacagatgtaccggaataatagggggctattattccttttttctgccatcatgtactttttatcaagaagcggttaacataatgacaagaacagcttgaaaacagaggtgcttacatgacaaaaggccaaaggcatataaaaatcagagagcttattacaagccatgagattgaaacgcaggatgacttagttgacatgctgagagaagaaggatataaggtaactcaggcgactgtctccagagacattaaagagctgcatctcgtaaaggtgccgacaaacaacggctcctacaaatacagcctgccggcggatcagcggttcaatccgctgtcaaaactgaagcgttcattaatggatgcgttcgtaaaaattgactcagcaagccatatgatcgtattaaaaacgatgccggggaatgctcaggcaatcggcgctctgatggataatctcgaatgggaagaaatcatgggcacgatttgcggagatgacacgatcttaatcatctgcaggacgcctgaagatacggagggcgttcaaagccgtcttttggagctgctgtagcgtaattatcagataaaaggtggaatgctgtttgttagctgaactatcaataaaaaactttgccattatagaggaactgacgatttcgtttgaacgggggctcaccgtcctgacgggagaaacaggggccggcaagtcaattattatagacgccgtttccctattagtcggcggccgcggctcgtctgaatttgtccgttacggtgaaacaaaggccgagcttgaaggactgtttcttttggacagcggtcatcccgtttttgaagtatgccgtgagcagggaatagacgcatctgacgacatgattgtcatgagaagggacattaatgccggaggaaaaagcgtctgccgtgtcaacggaaaattagtgacgattgcggctttaagggagatcggcagacttttattagatattcacggacagcatgataaccagctgttaatggaggacgataaacacttagagctgttggacaggtttgcgggcgctgaggccgaatccgcgcttcaggcttaccatgaaggctatgagcgttatatgaagctgctcaaaaaagtgaagaagctgtcagaaagcgagcaggaaatggcgcatcggctagacctgattcaatttcagcttgaagaaatcgagtcggcgaagcttgaattgaatgaagacgagcttcttcaggaagaacggaagcagatatccaattttgaaaaaatttatgaatcattgcaaaacgcctataatgcgctccgcagcgagcagggggggcttgactgggtcggaatggcctctgcccagcttgaagatatttcggatatcaatgaaccgctgcaaaagctgtcagaaagtgtgtcaagttcctattatctgctggaggatgcaacctttcagatgcgcaatctgttagatgatctggaatatgacccggaacggctgaattttattgaaacccgtttaaatgagatcaaacagctgaagcgcaaatacggagcgacggtagaagacattttggaatacggctctaaaatagaagaggaaatcgatcaaatcgagaaccgcgacagccaccttgaagcgctgaagaaggaattggagtcggtcggcaaagatgtggccgtagaagccgccaatttatcaaaaatcagaaaagcatgggctaagaaactggcggaagcgattcatcaggaattaaaaagtctgtatatgggcaaatcaacgtttgatacggaatttctcgtgaaaaccgatccgtcagccagtgaagcaccggttgttaacgggcagcccgtgcagcttacccaaaaggggattgaccttgtgaagtttttaatttcaacaaacaccggtgagcctttaaaaccgctgtcaaaggtcgcttccggaggcgagctttcaagggtgatgctggcgatgaagagtattttttcttcccagcaggatgtcacctccattatctttgacgaagtggacaccggtgtaagcgggcgggttgcccaagccatcgcggaaaaaatccataaagtatcgaccggttcacaggtgctctgcattacacacctgccgcaggttgccgctatggcggatacgcaccttctaatcgcaaaagaattcaaagacggccggacgacaacgcatgtcacgccgctttccaaacaggacaaggtagcggaaatcggccgcatgattgcgggcgtcgaagtgaccgatctgacaaaacggcatgcacaagagcttttaaaacaggccggacaggtaaaaacgacaggataagctgctgatacaggcagcttatttttttgttccatttctctaacagtgtatccaatgtttttcttcgtatgccggttataaatcaagcgcaggaaggcaaaagtatagatgtagcagaaaaagaaagtggtgtgggataggagcgaggagagtgaaggaatgaatgcacgataacatgaggaaagcaataggtgtaattctccttgtttctttactaagtgtaggcttttttaagccatttaaagaatatttactgataccgtcagaaatgagcgtctttgaaaaccagacacaggccgttccggtcaatgcatcaataagcgctgaaaagggcgaattatcagaagcctttacgctgaaagaagagcacggccatgcaaacataacagggcaaacacaaggccggtcagaagtagtatataatcttgccggatttcccattaaaaaaacgaaagtgcgtgtccttccagaattgaaggtcattccgggcggacagtccatcggtgtaaaactgcattcagtcggtgttttggtcgtcggttttcaccaagtgatgacaaaggatggaaaaaagtctccgggagaacaagcgggaattgaatctggcgacatcattattaaaatgaacggacataaaattgaaaaaatgagcgatatcgccccgtttattcaaaaagcgggcaaaaccggtgaatctttggatttattggtgaaacgcgataagcaaaaaatcaaaacaaagctgattccgacaaaggacgaagccgaggggaaatatcgaatcggcctttatatccgcgattcggcagccggcatcggcaccatgacattttttgaaccgaaaacaaaaaaatacggcgcattgggccacgtcatctctgatatggatacaaaaaaaccgattgttgtagaagacggagaaatcgtccgttcaactgtaacatcgattgaaaaaggaaaaggcggcaatcccggcgaaaaactggcaaggttttcgtcagaacggaaaacgatcggcgatattaaccgcaacagcccgttcggcatcttcgggacactgcatcagccgattaaaaacaacatttccgacaaagcgcttccgattgctttgtcaaatgaagtgaaaaaaggacctgcgcaaatgctgacggttatcgaaaacgataaagtagagaaatttgatattgaaatcgtcagcaccacgccgcaaaaattcccggcgacaaagggaatggtgttgaaagtgacagatccgaaactgctgaaaagaaccggcggaatcgttcaggggatgagcggaagcccgatcatccagaacggaaaggtcgtcggagccgtaacccacgtatttgtcaatgatccgacaagcggctacggcgttcatatcgaatggatgctgtctgaagcgggtgttgatgtttacgggaaagacaaagcaagctgactgccggatgatccggcagtttttttatgtgatgcgttcttcacttctttcctggattcatgtaaaataagacatgaagatttttcgacaaattcacgtttcctgatttgtcaaacttaatttttagtcgaaaaacctagaaaatgctagaaaaacaaagatataccactattattggtaaatatggattttttaaaaggggaagtagtggttttgtcgaatgtaacatgtagcagtcaaatgggttgcgtcctgttaatacattgggggaggaagaaacgtggagaaaattaaagtttgtgttgctgatgataatcgagagcttgtaagcctgttgagtgaatatatagagggacaggatgatatggaagtgatcggcgttgcttataacggacaggaatgtctttctttgtttaaagataagaatccagatgtgctcgttttagacattatcatgccgcatctggacggacttgcggttttggagcgtctgcgggaatcagagctcgagaagcagccgaacgtcatcatgctgacggcattcggtcaggaagacgttacgaaaaaagccgtcgatttaggcgcgtcctatttcatcctgaagccgtttgatatggaaaaccttgtcggccatatccgccaggtaagcggaaatgtcagcagtgtcacacaccgtgccccgtctgcgcaaagcagcattatccgcagccagcctgagccgaagcggaaaaatctcgatgccagcattacaagcattatccatgagatcggtgtgcctgcccatatcaaaggctatctttatttgcgtgaagccatttccatggtgtataacgatattgaactcctcggcagcatcacaaaagtcctttatcccgacatcgccaaaaaattcaacacgaccgcaagccgtgtagaacgggccatccgccacgccattgaagtcgcatggagcaggggaaatattgattccatttcttcactgttcggatatacggtaagcatgacaaaagcaaagccaaccaactcggaattcatcgcgatggttgctgacaagctgagattagagcataaagcttcgtaacgcaagcttttggctagatgtctttttcacgccttctattccgtgcatgaacgcggaagagaaggcgttttgaaattttgctggcgaaaacaatggaaatcactcacgccgttacttgttctatacataaatgcggtatctatgctgtctacacgtataataccggagctgatattttaatgattttgccgtctctgaaataaaagcgggggacgcggcggcttaacacagataagacttcgtagctgatcgtaccgagcatttcggcaatttcatcaacggaaatctcggcaccttgttgtttaccgtagatgacgacttcttctccttgtttgccctcattctcacctaaactgaccatgatcatatccattgtcactctccccgccaccggcacccgtctgccgcggtgaagaataaacccgcggttggacagggcgcgggagtaaccgtcaccatagccgatcggaatcgtcgcgatgatttcacccggttcggcgatatatgtggcgccataactgacggtccggggatctgtcaccatagctttcacataagcgatacgcgcctttaaacttagtgcgggtgtgagatccacgaggttcagttcctttatcgaggcggacggatataaaccatataacccaatgcctaaacggatcatgtcggcgctgaattccgggaatgcgatagcggcggctgtattgcacatatgcacggtaggcagcgtaatgtcttgattttttaaaaagcggagaaagctgataaacttttcgtgctgcagcatcgtcagctcagtgtccggttcatccgctgttgaaaaatgtgtaaagatgccatcccatgacagatatgtactcgacttgagcgctttcaccactgctaaaagatcttcttccgtacgcacacccagccggcccattcccgtatccacattgatatgaatggacagccgtttcgaatctgcttctttttccaatatccgattcgcttttttgatccagctgacttgaaacgctgataatgttatgttccaaacggcagattttttcacacagctgagagctgtgaagccgagcacaagaataggtgccgtaattcccgctctccgtaacacaattccctcttcgacgctggcgacagcgagctcgctcgccccgctttccaatgcctgccgcgctacttccacagagccgtggccataagcgttcgcttttacgacggccataattttagacgtattcggaatatggcggcggatcgcccgtacgttcttttttatcgcatcaaggtcaacttcaatccaaacttcccggcaaagttttttcatcacgattccttctttccttaatgagtttcagtactcatgctttcaatctgcattctattcaccttgaactgaaatcattcaaaacaagggaaggtgatcgctgatgtttaaaaatcaagtttttgggaaatcagtgtgtctgctttatttatgctgaaagggctgcatggcagcccttaaattgactttacaatattctgatctgaaaattgatgttcaaacattttggactggcttacagcattgttttgaatgacaatgccgatatttccccctccggcaccgaaaacagtttttgatgcagtcagcggactgatggatatggcgccgccaacattgacaactccgtttcctgatacgttgtttatcgtaatcgggcaaccgctcattctattttttctcctttctctcacagtctactaactatatgtacgctgtgatatggaataagattaaacaaaacggcaaaaagaatccggctgctgccagccggaaagggagggaaatacggatgtcatagtgttttcgttacattttgatcagagtattgagagcttgaagattgagatgtactggattgattcatttgcaggaccatccctgtatttcccccacctgagccgtagacggtttttgatacggttaaaggacttatcgaaaacgcaccgccgacattgacaaccccgtttccggaaagactgttaatcgtaataggaaaaccagccatcatatacggtctcctttctattaatctatttactatatgtacgctgtgtgttagaaataggagtaaacaaagcggtaaaaacttgtaaatcaaaaaaaactgccggacatccggcagtttttttagtctacttttcaaacggcacccagccgcctgtattctgaatcatttcccataacggttcaggaagtcggtatttctcaatttcagatgcttgaatggctttttcgatttcctgttcgcggccttctttgaccagcaccgcccattcggggttaatcaaaatgacacgtcccagagccaccagcggaattccgctttctaatacagcaagcgcttcgtccgcggtatagatggaaccgacggccatcagcggcactttatggccgacgcgttcgtttaataaatccatccgcgtccgtgaagaatccgccccgcggcgggctttggagttgacatccatcagtgaaatatgcagataatccaagttctcttccgcaagcgcgtcggcgagcatgaatgtttctttcattgtaagccccggtgtttccggctcttccggtgacaggcggtagccgagaacgaatggattttcagcgtgtgtatcaattgcctgtttgacagcgtcaacgactgcaagcgggaacgcaaggcgcttttcatcgcttccgccccagcggtctgtgcgccggtttgttttcggtgaataaaattggtgaatcaggtacccgtttgccccgtgaatttcaacaccgtcaaagccggcttcaatcgctctgcgtgtcgcttcgccgaatgctttcacgatgtgctcaatttcttgttcggtgagagcccgggacgtttgtctcccgtcttcttctgagccgctcggactgacgacgtcgttgtttggcacgagttcaggagggcattccaatcctccgtggtgaatctgcacaacggctttcgctccttgagactggatcgcctgagcgagttttttcaagccgggaatgtgagaatcatcatagatgccgggctggcctggaaacgctttgccgtccggcgttacgtttgcacatgccgtaatgaccatgcccatttcttttgaacggggagtaatgtagcttaattcacggtcggaaatcgttccgtcatcatttgatgaatagtgtgtcatcggtgcgactgaaatacggtttggtatggtgacgccgctttcgaacgtaaaaggttcaaacagcggtttataagtttgcttcatcatttcgccttcttccttaggagtttaactcgtccgtattctagcttatgttttaattgtgtgcaattattttgcttgttcttcttcctgaggttatgaccggctgaaccatttaaacgaatgaaacggttttctccgttccttttcaggatctttatatcctcctgaaatttgatggccgatcgagctgaatatgacagcggcggcgaagaggagaatgatttttttcatatacatatcttctttcttatcttttacaaggttatttataagcatacgcttgtgcgaaaaaaccgtcaatttgtttttatttattcttttttccactttcctgcggcgaatatcgttccgatctgaatcacaacacttaacagagcgcacactgccacaactgtgttgctgtccatagaagacaccctcctttttgttaggttgatgtatcatatgacagctgtctctgttttgacaaaaccgtaatgcggtgtttcatatttttcaacacaaaaagggcgcttttttaagcgcctttacttttttttcagccggttcaaagcgatttgaacggcgatggcgtcatccaggtagccgatcggaaacatgtaatccggaatgacgtcggtcgctaaaatataatacagcagcgcgctcccgagaatcgcgcggtcttcagccggtgttgattcatccatatactgatgatgcatgtttttcaaatgatcaataaaagggccgacgctttcttcattgtccattttcttttgaaactcatcgcaaatcaggcgatggccctgctgggttttggcatattgttcatatctggtcagttcgcgctcaatttgctcccgggaaaaaggctgatcaaacatctcggccatattcagcatatcctgaatcgcgtgcatcgggtcttgcggcgcagcttctttttcatggccgatgtctatgcctgacgcctcaagcaattcctccagcggggtgcggagatgttttgaaaattcctgaagatgctttaaattggccttctgcttgccgtttataatccgggagatggtggccgtatcaatgtttgttaaggcgccgagttttctcatggagagcgagtgcttatcaagcagtgattttaaaaggggccccagtgtcgtatttttattttctgtcaagggtgtcacctcgtttccgccggaatgatgatcattaatcaataatttttgcagaataggtaccttttctgtgctgctgaataggatagtgtagattcaacggcacaacatgttgaaaagacatcaaagaatggagagaaacgaacatggcttggttattgattttaggtttggcagtgtcctcgagcattgataatttaggagtggggatgtcatacggcatcagaaaaatcaaaatatcgcatgcgtcaaatatgatgatcgcttttatctgttttgtattcagttatatcggaatttatttcggtaaatggatttcagccgttttaccgggctttcttcctgtattactggcggcgtttattttatctgtcatcggtatccgcatcattctgctggctgtgccgagaaaaacagcgcgtgttggcgcgtcaggaaaaaaaggccgttttgccggtctgctgcaaaatccggaggcagcggatgccgacggttcgggagaaatcggtatattggaatccatggttctcggggtagccgtatccgcaaatgcgctgaccaacggattaagcgcggggttgatcgggctttctcccgctgccatttccatcactgcggcggtcggaagctttctgaccatatggatcggctgctcgcttggaaaaaaagccgcgtcactgcgcatcggttcttttcacatcggacagttcagcacggtgctgagcggagtgattattctcatcattgccgccaatacgctgctcttttaagttgtcccgttcattttatgaaaagctcaaaataaatatgaatgtttctattcgggagagcgcatgacgcggctctctttttttgccgatctgatattttttcaaaatgaacagaaagtcgtccgtttccgttaaattctgcatattcggccttcagacagaacctttttcatagactgatcagcttgttttctttctaagttcaggtaaacagcaggtcagatagccttcattccaaatatggaaaagcgctggaggaatggaggctccctttacaaatcggtcattctgttcaaagataaagccgaatgagaaaacgtgaggtgatctgtgtgaagtctgtcatacttctgatcttcaccgcatggctgttatcaggctgcgagtataccgcggaggctgatgcggcgccgtcatttacacaggaaggaacatttataaaagcggccggaaacgatacgatcgcggtcgaaattgacggagaaaggcaagaggtgaaggtgcctttcgctaagcggtttgaatgtcagtctctgcctgaacatacggcggtgcaaatcacctataaaaaagagagcaacggacaattacggcttgaggaactgaaaaaagaaacagatatgtgaaaacggggaggaaaaaacgtgggtttactgacaaaaagtgctgctgccttcggtgccgctcttcttctgcttgcgccgtctgcttatgcagctgaacctttgcaagggaaaaccatttatatcgatgccggacatggcggagaagacagcggggccggcggaaatggactgcttgagaaaaacatcaatttagcggtgtcaaacaaggtgatcgccaaattggagacagaaggcgcaaaacctgttgcttcaaggactgacgatacttttttacgtttggacgagcgggtggcgaaagcaagcgccagccaatccgatttattcgtcagcctccatacgaattcagccgtctcaacggcatcgggcacggaaacgtattttaattcgacatatgaaggagcagacagcgaaaggcttgcttccgacatccagcagcagcttgtcacgtctttagggatgaaggacagaggcgtaaaagaagctcctttttatgtcattacatattcaaagatgccgagtgtgctggctgaattaggttttatcacaaatcctcaagatgcggacaagctgaaaagcgataacggacaagagcacgccgcggacgccgttgtaaacggaatcgaaacctattacagcggacggtaattataaaatatgtgtaaatagcgccctccttatgtgcataacgaatataatagagaaaaccgatgacaaacacctgaggtgacacatatgacgaatatttttgcccaccggggggcgtcgggcgactgccctgaaaatacgatgcccgcgttcaaaaaagcgattgaggacggggctgacggaatcgaacttgatgtacagatgacaaaagacggccggatcgtggtcattcacgatgaaacactcgaccgcacgacgtctttgaaaggatttgtgaaagatacggcgtatgacaaaatcagaaccgctgatgccgccggaaaatggaaagatgcttttaaaggtgtcagaattccgcttttgtcagatgtgctgcgttttgcggaacgtgctgattttctgataaacattgagctgaaaaacagtgtattccgttacgaaggaatggaagaagaagtgattaaaaaagtcagatattacggactggaaaagcgcgttattttttcttcatttaatcatgagagtctcgcggtttgctatgccctggcgcctgaaattgagcgggcggtgctgacaatggatgtgctgtaccggcctgaacggtatcttgccgccattcccgcttcgggttatcatccgaagctcggtacgccggcggtgagcgctgaagtgatcaaacatcttgcaaaacaccaagcggcgctccgtccgttcaccgtcaatcgtcctgaggatatgaagcagctgatgaaagcgggagcagacgcaatttttaccgattatccaaagctggctgtttctataaaagaagaatgccgcagctgagaagactgttcagacagtcttctttttttatgggcgggaaaaaggcggtgcactcataactcggtcagccggttcatatattgtaacagttttgtgtaagcgttatcttttatcttattgaaagtgaggcaaaattgtgggaaaaacggttatcgtcagtgcggcaagaacgccgttcggaaaatttggcggcacattaaaagaggtaaaggcggccgagcttggcggcatcgccataaaagaagcaatcaagcgcgccgctatcagtgaaagcgaagcggaaggaacggtgatgggaatggtcgtccaggcgggtgccgggcagattccggcacggcaggctgcaagatatgccgggcttccgtggtccgttccggctgaaaccattaataaggtctgtgcatcagggctcagggccgttaccatctgtgatcaaatgatccgggcgaaagatgcggacgtgctgattgcaggcggaatggaaagcatgagcaacattccgtacgccattccggccggccgctggggtgtgaggatgggggacggggtgtttcaggatttaatggttcatgacgggctgacctgtgcgttcgaccaggtgcatatggctgtccacggaagcactgcggccaaaaagtacggcatttcccgggatgaacaggatcattacgctcttttgagtcagaaacgcgcggctgaggcggccgaggcgggcaaattgcgtgaagaaattgtccccgtcacctggaccggcaaaaagggcaaacagcataccgttgaagcggatgaggggctgcgccctgatacgagccttgagcagcttgcagcgctcaagccaatttttacagccgacggaacggttacagccggaaacgctcccggtgtaaatgacggggcaggagcatttgtgctgatgtcagaggaaaaagccgcgaagcagcatgtcaggccgctcgcagcgatacttggctttgcgtcagtcggactggaagcgtccgagctggccagcgcgccgggagaggccatcagccggctcttgacaaaaaccggactgtccgttgacgatattgatttgtttgaggtaaatgaggcatttgcgtctgtcgtgctggtgagtgaaaaaatagccgggttcagccgggaaaaagtgaatgtaaacggaggggcaatcgcgttcggccacccgatcggcgcaagcggagcgagaatcatcatgagtttaatatacgaattaaagcgtcgcggaggaggtttaggcatagcggctatatgcagcggagcggctcaaggagatgccgtcctgcttgaggtgtactgatcaaaggagggagcgccggatgaagatgaaaacaatcatggtcgcaggtgcgggtcagatgggagcaggcatcgcgcagacggctgcagaagccgggtttgccgtcaagttatacgattgggagccggaaacggtaacaaaaggtcttcaccgcataaagacaaacctggagaaagagcaggcaaaaggacggaagacacagcaggagacagatgccgttttcagccgtatttccccggcagagctcacagaagcgggagatgctgattttgtaattgaagccattgcagaaaacaaaaaagcaaaagcagaattgtttgacacactagataaaatctgtccccctcatgccgtattggcaagcaatacgtcttctcttcccattacggagcttgccgcggccacaaaaaggcctgaaaaagtaatcggcatgcattttatgaatccggttcctgtcatggagcttgtcgaagtcatcagaggactcgccacatcggaagaaacggcggaaacagtaaagaagcttgccgtccggatgaataaaacccctgtcgaagtcaatgacttcccgggctttatatctaatcgcatattaatgccgatgattaacgaagccgtttattgcctttacgaaggagcagcttcaaaggaagccattgatgaggtgatgaagctcggcatgcggcatccgatgggtcctttaacattagctgacttcatcgggctggatacgtgcctttccattatggaggttctctatgcggggctcggagattcgaaataccgcccatgccctctgctcagaaaatatgtcagcgccggctggctcggcaaaaaaagcgggcgcggtttttatgagtacggcagatgacgtaaagatcatgaggggagacggcagccatgcattttacagaagagcacatcatgatgagaaaaatggtgcgtgattttgcccgcaaggaaatcgcgccggtggttgagctcatggaatcaacagatgaatttccggagcggctgattaaaaaaatgggcgaagcgggattgatgggtattcccgtcccggaaacttacggcggggcgggtgctgatacaacatcttacattttagcgattcatgaaatatcaaaagtcagcgcggccgtcggcgttattttgtccgtccacacatcggtagggacaatcccgattttgcatttcgggacagaagcccaaaaacaaacgtatattccgaagctggcagcgggcgaatatattggggcttttgcgcttactgagcctcaatccggatctgatgcgggaagcctgaaaacaacggctgtgcgaaaaggcggttcatatattctgaacggttcaaaaatctttattacaaacggcggagcggcagatctgtatctgacattcgccataaccgatccaggtaagggaagaaagggaatttccgcgtttatcgttgaaaaaaacacacccggtttttctgtcggaaaaaaagaaaaaaagctcggactgttaggttccaatactgtcgaattgcagtttgaccaagcggaaattccgattgaaaaccggctcggcgaagagggcgagggcttttcaatcgccatgaaaaaccttgacgtcggacggatcggcatagcggctcaggcgctcgggattatcgaagcggcgctcggctgctcggtggagtacgccaaaacccgcagccagttcggcagacccatcgcttcgaatcaggccgtttcatttaaattatctgacatggcgacgaatgcggaagctgccaaattattggtctatcatgctgctgatctgtatcagcgagggcttccgtgcggaaaagaagcatctatggcgaagcaattcgcgtccgatgcggcgatgaaagcggcggtggaggctgtgcagattcacggcggctacggctatatgaaagagtatcccgcggagcgtttatttcgggatgcgaaagtcacgcaaatttatgaaggaaccaatgagattcaaaggctgattatttctaagtatcttcttcaataaaaagtgcgcaaaggagcgaaaccatggaatcttattctcccggtttagatggcgtcattgcggtggaaacggggatttctttcctggatacacagcagggcagtattttaatcaaaggccacgatctgattgagctttctaaaacggccggctatatggacattgttcatctcttattggaagacagacttcctgatgcgaaagagaaggcggcgcttgaagaagacgttcggcgcggcgggcaccttcccgaggaaatcttgcacatatgccgtctgctgcccgaacatactcacccgatggacggactgaggacgggtttgtccgcgcttggaggctttgacaaggacatcgatgaccgttcatcttccgtaaatcagcaccgcgtacgcggactgataggcaaaatgccgaatctgacggtcaacagctatcgagtcatcaacgggctggagcctttggcgccggttggaaccttatcatacagcgcaaactttttatatatgattaccggaaaaacgccgtcatctttggaagaagaaatcttcgacaggtcgcttcttttatacagtgagcatgaattgccgaactcaacgtttacggcccgtgtcatcgcttcgacgcaatcggatatttacggcgcgctgaccggagccgtcgcctcgcttaagggaaatcttcacggcggagcgaacgaagcggttatgtacatgcttgaggaagcgaaggatacagacgggtttacacaattattaactcaaaaactcgcaaacaaagaaaaaatcatgggcttcggccaccgtgtctacatgaaaaaaatggacccgagggcgcttatgatgaaagaagcgttaaaaaagctgtctgatctttcaggtgatttccgtctttatcatatgtgtgaagccggcgaaaccgtcatgagggagaaaaaaggcctttatccgaacttagattactacgcagcgccggtctattacatgctcggcatcccgataccgctgtacacgcctatattcttcagcgcacggacggtcggactgtgcgcccacgtcattgaacagcacagccgaaaccggcttttccgcccgcgtgtccgctataccggagcgcgcctgtaaacagatgagaaaggaagatgaaaacatgacagaaccccgccgaatggacgctgtaatcgaagagatttctgactacgtgctccatcaggagattgacagttcagaagcttttactacggcaggacatgtgcttcttgatacgataggctgcggaattttggcgctcagctatcccgaatgtacaaagctgctcggcccgattgtcccgggaacctccgtccccaacggcagcagagtcccgggcacgccttttgttttagacccggtcacggcagcttttaatatcggctgtatcaacaggtggctcgattataatgatacgtggcttgcggcggaatggggtcatccgtctgacaatctcggaggcatattggcttgtgcggattatatatccagagtgcggatttcagaagggaaagaaccgcttaccgtgcgcgatgtgctttgcgcaatgatcaaagcgcacgaaattcaaggaattctcgctttggaaaacagcttaaacagagtggggcttgaccatgtgctgtttgtgaaagtggcgactgcggctgtttgcgcacaaatgctgggcggctcaagagaggaaatcaataacgccgtatctcacgcttggattgataattcaagcctcagaacgtatcgtcatgcgccgaacaccggatcacgcaaatcatgggcggccggcgacgcgacgagcagaggcgtatatttggcccttatggcgcaaaaaggtgaaatggggtacccgacggctctgaccgcatctgggtggggatttcaagacgtattgtttaaccggcaggaaatgaagcttgcccgcccgcttgggtcctatgtgatggagaatgttttgtttaaagtatcctacccggctgaatttcacgcccagacagcggcggaatgcgcggtccggcttcatcctgaggtgaaagaccgcatcgaagacattgacaggatcacgattatgacccatgagtcggctatccggattatcgataaaaaagggccgcttcacaatccggctgaccgggatcactgcctccagtatattacggcaatcgggctgcttttcggagatatcacggcggatcattatgaagaggaaacggcgtctgacccgcgaattgatacattgcggagcaaaatggaggtgacggaacacaaagcgtactcaaaagattacttagacccgaataagcgatccatatcaaatgccgtacaggtgcattttacagacggcacggctacgggacggattgaatgtgaatacccgctcgggcaccggttccgcagaaaagaagccgttccgaagattcttgccaagttttcagcaaacatcagcactcatttttcattgaagcagcagcgtaaaatcaaagaggcctgcgaacatagcggccgaatgcagaagctcagcgtcagtgaatttatggacttatttctcgtataaaataggagggtgacaaacatgacgtggatcgtcagcaagcagtcgtctcaagaggagcttgcagagcggttccgtacgctgatgacagcgccggatctattgcagatccccggcgctcacgatgcgatggccgctcttatcgccaagaaaacggggttttcggctctttatttatcaggcgcggcttacacggcgagcagagggcttcccgatttagggatcatcacgtcggcggaaatggctgaacgggttaaagatctggtccgctcgtctgatctgcccgtccttgtcgatattgacacgggtttcggaggagtgctgaatgccgcccggacggcgaaagaaatgtatgaagcgcgcgcggccgccgtccagatggaggatcagcgcctgccgaaaaaatgcggacatctgaatgggaagcagctcgtgccgattgaagaaatggcgcaaaaaatccaagcggtcaagcgggccgcgccgactcttcttgttgttgcgagaacagacgccagacagcaggaaggattggagggggcattaaaaagggcgtccgcttatataaaagcgggtgctgacgctgtttttccggaagcgctccaatccgaaagtgaattcagagcgttttccaaacaaatcagtgtgccgattctcgcaaacatgactgaattcggaaaaacgccgtattacagtgctgatgaattttccgatatgggctgtcagatggtcatttacccggtcacgtcactcagaacggcggccaaggcttttgagcgcattttccgccttctgaaagaagaaggctcgcaaaaagaggggctttcggatatgcagacgagaaaagaattatatgaaacgatcgcttacgatgactatgaagaactggatcaatccattgccaaaacgatactgccggacgactgaaaaagccctttttttgcaagggctttttttacagcttttttttcctgaaccgcggactgacttgattgcgtttccgatctctgtacagaataaacccggccagaacataaaggccgaacaaaaaaaacgccaatccggccgccccctgaagaaaaagggacggaaacggggaaaacgcatgcccgaataatgcatctctcatcagcttaatgccgagcgccgcgacagcgccggggaggaccagaatcaaaagcgcaacaagccggctcatattcagaaaacccctttacgatatgttttcctttattgtccaatcgaaaaaatattttgtcaagagatcaaaacgtggtaacataggggttgtgcaaattattgcaacgggaaatacaggtgtgcaaattttttcatataaaggggtatcgggatgcagaaggtgctgattataggtgctggtaaaggaggcacggcgctcctacagattttgatgaaaacaaagctgatccggattattgcggtggttgatcaagatccggaggcgcaagggctgcaagaagcccggaaatatggaattgcaacctcatcagattggaaaccctacataactgaagatatagatattatcatccatacaacaggcgataaagcggtcatggatgagctgctccatgagaaaaaagaacaaaccatcgtcatgccgggaaaattggcgtacatggtgtttcagctgatggaggaaaaacagcagcttatccaaatgctgaagtcgcagacgtataagcatgaccggatttttaattcaacgcacgacggcatgatttttatagacgtcaacgaaacgatcattttatttaatcagatggcagaaaaaatggtcggccaaaaacgggaggatgtcatcggccgccaaattaaagatgtagtgccgaacacaaagctgccgcggattctggaaacgagagagccggaatataaccagaagcagcttctcggaaagcacctgcagattgtcacgacaagactgccgatcattgatgaaggcggaaaacttcttggcgcgttatgcgtgtttaaagatatcaccgacgcagttgaactggcggaagaggtcacgaacttaaaacaaatccgcaccatgcttgaagcgattatacaatcatccgacgaggccatttctgtcgttgatgaaaacggcatcggaatgttaatcaacaaagcgtatacaaaaatgaccgggctgtcagaaagcgaagtcatcggaaaacccgcttccaccgatatctcagaaggggagagcatgcacctgaaagtattggggacaaggcggcccgtgcggggtgtgagaatgaaggtcggccccaataaaaaggatgttatcgtaaatgttgcccccgttattgtggacggtattttaaaaggcagcgtcggcgtcatccacgacgtgtcagaaattaaaacgctgactgctgagctgaatcgggcgcgccagatcatccgcacgcttgaagcgaaatacacgtttgacgacattatcggcacgagtgagcaaatgctggtcgcccttgaacaggcgaagctcggggcgaaaacgccggcgacgattctgctgcggggagaatccggcacaggaaaagaacttttcgcccacgccatccataatgaaagcgaccgaaaatacaataagttcattcgggtcaattgtgcggccttgtctgaatcactgctagaatccgagcttttcggctatgaggaaggcgcgtttacgggcgcgaggcgcgggggcaaaaaaggactatttgaggaagcgaataacggcagcattttcttagatgaaatcggagagctgacccaaagcacccaggcaaagctgctcagagttctgcaggaaaaagaaattatcagagtcggcggcgctaaagcgatttctgtcaatgtcagaattatcgcagcgacaaacgtcaacatcgaaaaggccatggcggaaggcgcgttccgtgaagacctgtattaccggattaaccgctatccgatctcaatcccgccgcttcggcagcgcaaagaagatattgaagcgctgagcattcggctcattgaaaaaatcaatcaggattacggccgcaatgtaaaggggctcacgccgaacgcgctgcgagctttatcagcctacagctggccgggaaacgtccgggagcttgaaaatgttctcggacgggcaatgatatttttagagccgcacatggaacggatcgaacagcagcatctgcctgtttttgaatcagagctgaatgaaaaaaacggcacccaaagtgattttccggatgtggaaggggaaaagctgtctcaggctgttgaaaaatttgaagcgcacgtcattcaaaaaacgcttgaaaagcataaattcaaccgaaccaaaacggcaaaagcgcttggtgtcagtattcggaatctgtactacaaaatggataagtacggccttgcaaatgacggcatgcaataaattgcagagaaagcgcaaacagctgcatgttttcttgaagaaagccggaataaaccctcccgcacatttggcacggaacttgcattgttaaaagcggattcgcacaaggaaggtggtacaaaatgaagctgagagacctagttgaaaaagccgcggcaaaaaacgcaaaaaccattgcagtggcccacgcagcagataaagaagtgatccaggccgtcaaaatggcggcagaacacttgtcggcacgatttttactgacgggtgacagcggaaggctgaaagagcttctcgcaaatgagccgaagttcaatgctgaaatcatccacgccgattcacccgaagaatctgcggcaaaagcagtgcgcgcagtgcgtgaacaagaggcggacgttttaatgaaagggaatctcccaagctcaactcttctgaaatcggttttaaaccgccatgaagggcttcgttcaaaaagggtgttatcacatgtagccgtttttgaggtgccggactatgaccggctgatgtatgtgactgattcagcgctgaacattgccccgtctcttgaagagctcgggcatattctgcaaaatgcggttcatgtcgcacattcagtagggaaccctatgccgaaagccgcagtccttgccgctattgaaacggttaatccgaaaatggaggcgacccttaacgcggctgcgatcgtccagatgtgcaacagaggacagattaccggctgcattgcggacggaccgcttgctttggataatgccgtatcccaagcggctgcgctgcaaaaagggatttccggaagcgtagcgggccaggcggatattctcttggttccttcaatcgaggccggaaatatgctttataagtcaatgatttattttgcgaaagcaaatgttgctgccgtcatcgccggtgcaaaagcgccgatcgcattaacgagcagagcggataccgcagaaaataaactgtattcaattgcgcttgcgatttgcgcatcacaagaacagtaggaggaacgaacctatggaaatttttaaatatatggagacttatgattacgaacaattggtattctgccaagatgaacaatccggattaaaagcgatcatcgcgattcatgatacgacgctcggccctgcactcggcggaacaagaatgtggacatatgacagtgaagaagcggcgattgaagatgcactaagactcgcaaaaggcatgacttataaaaatgcggctgccggtttaaacttaggcggcgggaaaaccgttattatcggagacccgcgcaaagataaaaatgaagaaatgttccgcgcgttcggccgctacatccaaggcttaaacggaaggtatattacggcggaagacgtcggcaccaccgttgaagatatggacatcattcatgatgaaacagactatgtaaccggaatttctccggcattcggttcatcaggaaatccgtctcccgttacggcgtacggcgtctacaaagggatgaaagccgcagcgaaagcggcgtttggcactgattccctggaaggtaaaacaattgccgtgcaaggcgtgggaaatgtggcttacaatctatgccgccaccttcacgaagaaggcgcttctttaatcgtaacggatatcaataaagaatctgttaaacgtgccgttgaggacttcggcgcccgcgcagttgatcccggcgacatttactcacaggcgtgcgatatttatgccccatgtgctctcggcgccgtcattaacgatgacacgattaaacacctgaaggcgaaagtcattgcgggagcggccaataaccagctgaaagaaacacgccacggcgataccattcatgaaatgggaatcgtgtacgctccggattatgtcatcaatgcaggcggggtcatcaatgtggccgatgagctttacggctacaatgctgagcgggctttgaaaaaggttgaaggcatctatgcaaacattgagcgggtgctcgatatttccgcgcgtgacggcattccgacatacttagcggccgaccgtctggctgaggaacgaattgagcgcatgcgccgttcaagaagccagtttctgcaaaacggccaaagtatattaagcagacgataggaatttgatctggaggtatgaaaatgttcgaaaaggaaaaacgcattctcattctgaatccaggctcaacatcaacgaaaatcggtgtctttcacaatgaacgctgtatctttgaaaagacgctgcggcatcccgaagaagagctgaaaacatttaacagcatcatcgaccaatacgaatttcgaaaaataagcattcttgagtctttgcacgaacagggcatcaacatttcaaagttcgatgccgtttgtgccagaggcggcctgctcagaccgattgagggcggcacatatgaagtgaatgacgccatgatcactgatttgaaaaatggctacaacggccagcatgcttctaatctgggcggaattattgccagggaaatagctgacggattaaatatccccgcgtatatcgtcgatccggtcgtggtggatgagatgactccgctcgctaaagtatcaggaatgcctgaaatcaagcggaaaagcattttccatgctttgaaccaaaaagctgttgcccgtcaggcggcggcgtccctcggcaaacggtatgaacagatgaagatgatcgtcactcatatgggaggcggcaccacagtcggtgtccatgattgcggacgggtgacggatgtcaacaacgggcttcacggagaaggacccttcagcccggagcgcgcgggaactgttccggcgggtgatttggtagaaatgtgtttttccggcaagtattcaaaagccgatatgatgaaaaaacttgtcggcacgggcggactctccggctacctggggacaacggacgcggtgaaggtggaaaaacgcattcaggccggcgatgaaaacgcgcgtctcatttatgacgccatggcttatcaagtagcaaaagaaatcggggcggcaagcgccgttttaaaaggaaaagtagacattatcgtcctgacgggcggattggcgtacgggaaaagtttcgtatccgccatcaaatcgtacatagattggatttcggatgtactggtgtacccgggagaaaatgaactgcaatctctcgcgcaaggcgcgcttcgggttttagccggtgaggagcagtcaaagcaatatcagatcggcgaaggagtgaaaacaaatggcgactgagtatgatgtggtcattctgggcggcggcacgggcggctatgtagccgccatcagagcggtccagctcggcttaaaaacggccgttgtagaaaaagaaaagcttggcggaacatgcttgcataaaggatgtatcccgagtaaagcgctgttaagaagcgcggaagtgtaccgaaccgcaaaggaagcggcagcattcggcattgaaacggaaggtgtctccctccgctttgacagcgtgcaaaaacgaaagcagggaatcgttgaccggctggccggcggtgtcgcccacttgatgaaaaaggggaagattgatgtattcaacgggtacggacgtatgctcggcccttccatcttctcacctcttcccggtacggtttcagtcgaatacgcaaatggtgaagaaaatgacatgctgataccgaaacaattgattatcgcaaccggttcaaggccgaaaatgctgccgggtttagaagcagacggtacatatattctgacatcagatgaagcgttagagcttgaacgtctgccccactccatgatgatcgtcggcggcggtgtcatcggaattgaatgggcatccatgctgaaggatttcggcgtcaatatcactgtgattgaatatgcggaccgcattttgccgacggaagaccgtgatatttcaagcgagatggaaaaactgttaacgaaaaaaggaattaagatcgtgacgggtgcgaaagtgcttccggatacattggaaaaagcggacggcgtttcaattgccgctgaaaagaatggaaaaaaagaaacgtatcacgcggaacaaatgcttgtttccatcggccgccagccgaacattgaagggatcgggcttgaaaacacggatattgaagcggaaaacggttctatcatcgtgaacgaagccgggcagacgaaggaatcgcacatttatgcgatcggtgatgttgtcggcgggctgcagcttgcgcatgtggcctcccgtgagggcatcattgccgttgagcatatggcgggtcttaatccggctccgcttgatgccgctcttgtgccgaaatgtatttattcaaatccggaagcggcgagcgtcggtctgacagaagaggaagctcttcgaaaagggcatgaactgaagatcgggaagtttccgttcatggcgatcggaaaggctcttgtatacggagaaagcgacggctttgtcaaaatcgtcgccgatcggaatacagatgatattctcggtgttcatatgatcggcccgcacgtcaccgatatgatctctgaagcggggcttgccaaggtgctcgacgcgacgccttgggaaatcggccagtccatacatccgcatccgtcgctgtcagaagcgattggagaagctgcgttagccgcagacggaaacgcgattcatttttaaaaggaaagaaggaggggtttgaatgactacaaaccgccatcaagcattagggctctctgacgaagaagccgttgaaatgtatagaaccatgctgttagccagaaaaatcgacgaaagaatgtggctcttaaaccgctcgggcaaaattccgttcgttgtttcatgtcaaggacaggaagcggcgcaagtaggcgcggcctatgccttaaaccgtgataccgactatgtgcttccgtactacagagatataggggttgtgcttgcattcggtatgactgcaaaggatttgatgatgtcgggttttgcgaaagcagctgacccgaactcaggcggaaggcagatgccgggccacttcgggcaaaaggaaaacagaatcgtaacgggctcatcccctgttacgacgcaggttcctcatgcagtcggaatcgcgcttgcgggacgcatggataaaaaggatatcgtctctttcgttacctttggagaaggatcttccaaccagggggattttcacgaaggggcaaactttgccgccgtgtataaactgccggtcattttcatgtgtgaaaacaataagtatgctatttctgtcccgtatgacagacaggtggcgtgcgagaaaatatccgaccgggcggcaggctacggcatgccgggagtcactgttgacggaaacgacctgctggaagtttaccgggtcgtaaaagaagcgcgcgaacgggcgtctaaaggcgaaggccctacattaatagaaacggtttcctaccgtttgacgccgcattccagtgatgacgacgacagcagctacagagaacgcgaagaagtagaagaagcaaagaaacaagatccgcttcttttatacaaagcatacttgcaagaagccgggcttctaggtgaagaagaagaaaagaccatgctggatgacatcatggctatcgtaaacgaagcgacagacgaagcggagaaagcgccatacgcatctcctgaatcaacgcttgatcacgtttatgcgaagtagggaggaatacttatgtctgtaatgtcttatattgacagtattaatgcagcaatgaaagaagaaatggaaagagatccgcgcgtgtttgttctcggggaagacgtcgggagaaaaggcggcgtgtttaaagccacggcgggtctctatgaacagttcggagaagagcgggtgatggatacgccgcttgctgaatcagcgattgccggtgtcggcatcggcgccgcgatgtacggcatgcgcccgattgccgagatgcagtttgccgatttcattctgcctgcggtcaaccaaatcatttcagaagcggcaaaaatacgctaccgttcaaacaatgattggagctgtccgatggtcatcagagcgccttatggcggcggcgtgcacggcgcgttgtatcattcccaatctgtggaggctatttttgccaaccagccgggccttaaaattgtcatgccttcaactccttatgacgcaaaagggctgttgaaagctgcagtccgtgacgaagatccggtgctgtttttcgaacataagagggcgtaccgtctgattaaaggcgaagtccctgcggatgattacgtccttccgatcggaaaggcggatgtaaaacgcgaaggcagcgacattactgttattacgtacggattatgcgtccattttgctctgcaggctgccgagcgccttgaaaaagacggaatttccgcacacgtattagacttgcgtacggtttatccgttagataaagaagccatcattgaagccgcgtctaaaacgggaaaagtattgctgatcacagaagatacgaaagaaggcggtattatgagcgaggtcgccgccattatttctgaaaactgcttatttgatttagacgcgccgatcaagcggcttgcaggtcctgacgttccggcaatgccttatgcgccgacaatggaaaaatacttcatgatgaatcctgacaaagcagaagccgcgatgagagaattagcggagttttaaagacgtaaggaggtttttgacatggcgattgaacaaatggctatgcctcagctcggagagagcgtgacggaagggacgatcagcaaatggctggtatcccccggtgatcaagtgaataaatatgaccccatcgcggaggtcatgacagataaagtgaacgcggaggtgccgtcttcttttaccggtacgattacagaacttgtaggagaagaaggccagactcttgcagtcggcgagatcatctgcaaaattgaaacagaagaaacggaaaccgaagcggcgccgaagcgggaagaagagcagaataccccttcagacacagatgcaaaccgtcaaggtaaagatcagtcaaataaagcgcgttattcgccggccgtgctcaggttagcgggagaacacggcattcagcttgaagaagttgaaggaacgggtgcaggcggaagaattacgcgaaaagacattcaaaagatcattgattcgggaatgaagcagaagtcggaagcaccggtgccggctgccgttcaaacaacgcaacaagcgccgaaacaacagcaaaaacaagcgccggcacccgctctgtcagccggtgatattgaaattccggttacaggcgtcagaaaagccatcgccgccaatatgcataaaagcaaaacagaaattccgcatgcctggacgatgatggaagtggacgtcacgaacatgacggcgtacagaaacagcattaaagactcatttaaacagaaagaaggcttcaatttaacgtttttcgctttctttgtaaaagcggcggcgcaggctctcaaggagttcccgcagatgaacagcatgtgggcgggagacaaaatcgtccaaaagaaagacatcaacatctccattgccgttgccacggaagattcgctgtttgttccggttattaagcatgctgatgaaaaaacgattaaaggcatagccagagaaataacagaccttgcgaaaaaagtgagaaacggaaaacttaccgcggaagatatgcagggcggcacatttaccgtcaataacacgggatctttcggctcagttcaatctatgggcattatcaaccatccgcaggcggcgattcttcaggtagaatctatcgtcaaacgtccggttgtcatgaataacgggatgatcgccgttcgtgatatggttaatatttgcctgtctttagatcacagagtgctcgacgggctcgtgtgcggccgattcctcggacgcgtcaaagagatcttagaaaacattgatgaacatacttccgtctattaaaaaaactccttttgcccgggcggcaaaaggagcttttttattttcattgtgaatcctcgggaacaatcatagtgagatgatgttttttcacttcgatcgtacaaggtgttgttccgtatacctcgccatctgtatccgcgtccatctcacgtccggtttcgatttcaatcctggaggcctgaatataggacagctcccctttgaaatcatcaaacgaaccctgttccatcgtcatcagctcccgcaacgcggcaaggcttgtgttgcggcagattaacacatcggctaagccgtcctggaggctggcatcaggcaggggaactctgtttgtcccgatataatgcccgttcatgacaagcaccattacggcttcgtcttctttcacttcaccgtcaatcgtcaatttgacaggaaacgggttcgcgcttgtcatcgtccgcaaggcgctcgtgaagtagctgattttaccaagccatgctttttcagtttcattaatatggcttgatgcttcggtgatcagtccgatgccccagaagttcagaaaatagccgtcatccgttttacagacgtcaatcatccgtttatgtccggccgcgagcgcttcagcggccttttgaaggttttgcgggatgccgagcgcccgggagaaatcgttgcacgttcctcccggcaaaatgccgacagcgggtctgtgatcaagcttgctgatgctgttgatgcattgatgcacagtgccgtctccgcctaaaatatataaatggtcaactgaactgtcgagattttcacaaaactgacgggcatcatcctgatgtttggtcggtttaatcaaaagttcgtcagctgactgggccaaaatggggacgaccgtgccgagcgttttatcaatctgtttttgaccggcgtttccgttataaattaaaactgctttccgttggctcatatgactgctcctttatttcagacaatctccttaacaagtttcccgtttttaaagggtcataaacttacatcgggaacataaaagggacaaaaaacaattggatatgagcggtgtcatttgccgatagggaggttccttgctatcataagaagagatgatcaaaaaggagaggtcccagttgaatatggattttaatttatttatgaatgatgtcgtgcgtcaagcccgccaggaaatcacggccgccgggtatacagagctgaaaaccgctgaggaagtggacgaagcgctttcgaaaaaaggaacgacactcgtcatggtcaactctgtgtgcggatgcgcaggcggtattgcacggcctgccgcgtaccattccgtacattacgataaacgcccggatcagcttgtgacggtatttgccggacaggataaagaagcgacagccaaagcgagagaatactttgaaggctatccgccgtcctctccgtcatttgccattttaaaagacgggaaaatcatgaaaatggtggaacgccatgaaattgaaggccatgagccgatggccgtcgtcacaaaactgcaggaagcatttgaagaatattgtgaagaagtataagtgaaagaaaaaccccggagccaagcgcttgcggggtttttttatatggcatctgtataaatataaatatttatacatcggcgttcagctgtcactaacctgaaaaacaatgactataataaacacagaaaggaaaatatatttttcaaaaatagtattgcatcacaattaaaaagtgtttaaaatacaagttaacgaataaatattcaaatttaagagatcagtagatatgggggaaatgaatcatgaagaaatggctgttggtattagctgccgcatgtatcacctttgcgctgtccgcctgcggatcaggcaattcaggctcagaaggcggaaagaacaagctgattatgggtacatcggctgactataaaccatttgaatataaagacggcgatcagatcaccgggtttgacgttgatctggcaaaagctctgggcaaaaagaccggctatgacgttgaggtgcaggacatggacttcaacagcctgattacagccttgaagtccaagcaggtagatatgatattatctggaatgacacctacgccggaacggaaaaagcaagttgatttttctgatatttattatactgctaacaatatgatcgttacgaaaaagggaagcagcattaaatccttgaatgatctgaaaggcaaaaccgtcggtgttcagctcggctccattcaagaggaaaaaggcaagaagctcgcttcgaaatacggttttcagctcgaagaccgcaaccggatctcagacttaaccgaagagatcaaatccgggcgttttgatgccgcgattatcgaagacatcgtagcacaaggctatttcagttcaaatcaagatctgcagggctttgcgtcagcagatgcgaaatcagacgaatcgggttccgcgattgcgttccgcaaagacagtgatctgacagcgaagttcaacaaagcgctgaaagaaatggagaaaaacggagaaatcgaaaaactgaagaaaaaatggttcaccaacgagaaataaaagaaagctcaacttttcgttgagctttttatcttgaataaagacaaaggagatcacacgtatgaatttggatttctcagcgacaatcccccaaattccttttatattggaaggccttgcggtcacattgaaaattgtgctcgtttcggcggtcatcggtcttgtattaggcatcgtgctcagcttatttaaaatcagcacgatcagtccgctgaaatggattgcggatttttatacttcgatattccgcggcacgccgctcgtgctgcagctgatgatcatttatttcggtatgccgcagctcctcggctttcagatcgatcaattttgggcggcggtcactgcattatcgctcaattcagccgcttacgtctctgaaattatcagagcgggaatcaacgcaattgacaaaggacaaaaagaggctgccgtcgctctcggcgtgccgtacggaaaaatgatgaaagatctgctgctgccgcaggcgtttaaaaacatttctccggctattattaacgaattaatcaccttaacgaaagaatcggcgatcgtcacagttatcggtcttggcgacattatgagacgggcctaccagtccggcgccgcaacatacaactatttagaacctcttattgtggcgggcttaatctattacgtgctcgttttgatcttagcattcatcggaaaaggcgtagaaaggaagctgaaagccaatgattaaggtcgacaacctgtcaaaatcattcgggaaacatgaagtactgaaaaacatttcaacacagatcgaagaaggggaagtcgtcgctgtcatcggcccttccggttccggcaaatcaacgtttctgcgctgcttaaatctgctggaaaccccgagcggcggaacgattgccattaaagaaaatgaaattaccgcagctaaaacgaataaactgaaagtgcgggaaaatatcggcatggtatttcagcattttcatttgtttcctcataaaacggtgcttgaaaatatcacatacgcgccggtcagcgtgaagaaagagtctaaaaacgaggcggaggaaaaggcgtgcgccctccttgaaaaagtcggactgcttgacaaacggaacgactatccgaaccgtttgtcaggcggacagaagcagcgggtcgccatcgcgcgtgcgcttgccatgaatcctgacatcatgctgtttgatgaaccgacctcggctcttgacccggaaatggtcaaagaagttcttgaggtgatgaaagagctcgcgcagacgggcatgacgatggtgatcgtaacgcacgaaatgggatttgccaaagaagtggcagaccgcgtattattcatggatgaagggacgatcgtggaagacgggcagccggaagaattttttctttctccgaagtcaaaaagagcacaggactttttagaaaaaatattataaaatataactgtaagaaaagaagaagaatgctcttcttcttttttttgagaaagaaacaaacagaatggagcaagcaatgtttaaaatcggttaccgcacactaaagaccgcacttggaacggcgctggccatttatttagcccagctgttgcatctgcaaaacttcgcatccgcaggaatcatcaccatattgtgcattcagattacgcaaaagcggtcgcttcaggcctcgtgggcccgatttgccgcctgtttattggcgatcgtcttctcatatgtctttttcgggctgatcggctattatccgtttgcgatcggaatattgctggtgctgttcattccgactacagtcgttttaaaaataaacgaaggaattgtcaccagctcagtaatcattcttcatttatatatgtccggcggcattacgatggcgtttatctggaatgagttccagctgatcaccgtaggtatcggcgtcgcgctgttaatgaatctgtatatgccgagcctcgacagaaaactcgcggcataccggaaaaaaattgaggacaacttttccgtcatcttcgccgaaatcgaacggtatttgttaactggtgagcaagattggtcggggaaggaaataccggagacgcatcagatgattcaagaggcgaaaaacctcgcctatcgggacgtgcagaatcatattttgcgccatgaaaatctttactatcattattttaagatgagacagaaacaatttgaaatcattgaacggctgctgccgaagattacctctatttcaataacggtggagcagggcaaaataatcgcccatttcatccatgaattaagggaagccattcatcccggcaataccgctcataaatttttaaaaagacttgcagaaatgagaacggaatttgaagaaatgccgctcccggcaacgcgcgaggagtttgaagcgcgggcggctttgttccacctcctcggtgagatggaacaatatctcgtgattaaaagttatttcaaaggcatcaagctgtaaaaaacatatggatcaatcgcatgagtcctcctttcattggtcattctaatgaaaaaaggaggggagcccatgcgattttttttattgtcagccgccctgctgatgtctccgctttggccgcttggcgcaaaccctttgccgggtgacccttatattatcgtcaataaagccacaaatgcgcttgctgttgtgaaggataaccgaatacaaggcatttatcaggtggcgacgggaaaaacggatgatttgacgcctgaaggagaatttacggtaacggtcaaagccgtcaatccgtattaccggaagaaaaatgtagagggaggcgcgccggaaaacccgctcggcgtccgctggatcggctttgacgcgaaaggaaccgacggcaggatatacggcattcacggaacaaacagagaagagctgatcggggggtttgtgtcaaacggctgcatccgtatgaaaaaccgggatgtcatccgtattttccggattatccctcccggaacgaaagtattgattacaaaagaaaaccgctcattcgaggacattgcaatagagcggaaagccctcataaaaaagcaggaaccccccttgcaatgaggcgcctgcttttttaccgcaaatacatcataatgcctgagaggagggttgaaagaataaatacgcccaaaatgacgatgacggcgcttttcataaatttttgagacattgtttcactccttaagattactgtctatcattttaacgtgttttgcttgtatgaacaagccatatcctatggcggaaagcaggtggccgcgctatgaaaaaacttgatcatgtcggcattgccgtcagctctattgaagccgcgagaggattttacgaacggatgctcgggcttacgtatatgggagacgagctggtaagcggccaaaatgtgagagttgcttttttagaagcgggaggcacaaagcttgagctgattgagccgctgtcggacgcgtctcccgtcagctcttttttacagaaaagaggcgaagggctgcatcatttggcattccgctgcgccgatatgaaggaaacgatcaaggagcttgaagcatgccgcatgactctgatccatcatgaaccgcaaaacggagcgggcgggaagaagatcgcatttctctctccaaaagaggcgaacggggtcctgattgagctttgtgaaacaattgaaaaaggagaaactcaagatgagcatgagtgatcatatcagacacttaaatgaaagacgttcctttttaacaaacggcggcggagcggaaaaaaatgaaaaacagcacaaaaaaggcaagctgacggcaagagaaagaattgactatttattggacgaagacagtttttcagagctgcagccgtttgccaaaagccgcatgcccgggtcccgaaatgctccgggagacggcgttgttaccggatacggcacaattgacggacggcccgtgtatttgtttgcccatgactttaccgtactcggcgggacgctcggcgagacacatgcggaaaaaatcgcggcggtaatggatctggcggcgaaaaataaaactccgatcatcgggctgaacgactcaggtggtgcgagaattcaagagggtgtggtatcattaaatggatacggtcatatctttaggcgcaacgtcctttactcgggagtgattccgcaaatctctgtcatccttgggccgtgtgccggcggtgctgtttattcacccgcattgacggattttgtgattatggcggaacatacgtcgcacatgtttattacaggcccgaaagtcattgaacaggtgacgggtgaacagattgacgcggaaagtttaggcggtgcgggaatacataatgtgataagcggaaatgcccactattccgcacgaacggaaaaagaggctctttccgctgtgaaaaccctgctttcttatctcccgcacggcggacagacggcattgcccgttaaaaaggaagacgccagaccgttattaaacaccctcgttcccgcggacagttcgaaaccttacgatatgttacaggtaataaaagagctggcggatgacggaacgttttttgacattcagccgtattttgccaaaaacattgctgtcggttttctgaaactcggacggcgtacagtcggtgttgtcgcaaaccagccgaaacacttggcggggagcctcacgattgatgccgctgacaaagcgtcgagattcatccgtttttgtgacgcgtttcatattccgctattgacgatcgctgatgttccgggatttcttccgggctttcagcaggaacatgcgggaatcatccgtcacggagcaaaattgctgtatgcttttgccgaagcgacggtgccgaaagtgacgctcatcatcagaaaagcttacggaggcgcctatgtcgccatgaattcgaaagggctcggggcagatcttgtattcgcctggcccaatgcggaaatcgccgtgatgggagcggaaggcgcggcgtcgattttatacagcagagacatacaggcttctgacgacccggagaaaacgaagcgcgaaaaaaaagccatatacgaaaaggaaaacgccggtccgtataaagcagcggcctgcggaatggtggatgatatcatccggccggaagactcgaggaaaaaattgattcaggcatttgacatgcttgcgcataaggaagaggaaagaccgaaaaaaaagcacggtaatataccgctttaaacggagggaactgaaaatggtaaacgaaaaacgtctgcttgaagaatttcttgaactcgttcaaattgattcagagacaaaacatgaagcggaaatcagcaaggtgctcaaacaaaaattcactgatttaggattgagcgtaaaagaagatgatacaaaagaagtgacggggcatggagccggcaacttaatctgtacgttaaagggcacaaaagatgcggatacgatttatttcacatcgcacatggacacggttgtcccgggcaaaggcgttaagccgattgtggaagacggctatgtaaaatccgacggcacgacgattctcggcgctgatgataagacgggacttgccgcaatgtttgaagccattaaagtgctgaaagaacaaaacatcgagcacggcaccattgaattcattatcacggccggagaagaatcgggattagtcggggcaaaagcaatggatcgttcagacattaccgcgaaatacggttttgcgcttgattcagacggaaaagtcggcaacattattgtagccgcaccgacacaagcgaaagtgagagcaaccattttcgggaaaacggctcatgcgggggtagaaccggaaaaaggcatctccgcgattacaatcgcatcaaaagcaatctctaaaatgccgctcggccgtattgataaagaaacaacggctaatatcggacgtttcgaaggcggcacgcaaaccaatatcgtctgcgaccaggttgatattctggctgaagcgcgttcattagtgcctgaaaaaatggaagcgcaagtgcagaaaatgaaagaagctttcgaatctgctgcagctgagatgggaggccgcgcggaagtggacatcgcggtcatgtatccgggtttcaaatatcaggacggcgatcaggttgtggaagtcgcgaaaaaagcggcggcaaaaatcggccggccgagcgaacttcagacaagcggcggcggaagtgacgcaaacgtcattgccggccacggcattccgacagtcaacctgtcagtaggctatgaacaaatccatacgaaaaatgaaaaaatgccgattgaagagctcgtcaaaacggcggaaatggtcgttgccattatcgaaacagcggccaactaaaaacgaagcacccagttgtttgggtgcttttttcattcttcatgataattggtttaaagccttgcagatacaagaaaaaaccctgccggataggttccggcagggtttcagtattatgatttggcgggctccgcctgagccgcagcttgtttctttttatgatgcgtctgctgtaaaagtacattctgcactgtcaaaaacagtccgcttgtaaaccagtaaagcggcagcgcagccggtacgttaagtgaaaaaacggtcatcatgacagggaaaataaagaccatgatttttgctgactgcatcgcggccggattttgagcagccggtgaatatttctcgtttaatttttgggaaatataagcctgtaagaaatacatggcccccgcgcacagtgatacaagaatatcagaatgccctaagctgaaccacagaaatgagtgtgaagcgatttccggcgttgagcggatggcgtaataaaaaccgatcaaaatcgggaattgcaccagcatcggaagacatcccattgccatcggattcagattgtgctcacggtaaagcttcatcatttccatttgcagttctttttgtttctccgcatctttcgtttgtttcattttagcctgaatgctgtcgacctgcggtttgatcacagccattttttcctggaacacccgctgtttcttaaattggttcacaaacaaaggcaatacaacgatccggacgataatcgtcaccagaataatcgacagtccgtactcaccgtggaacaggcccgccacaccttttaaaagtgccgaaaacggctcgatcaggtaatcgtggaaaaacccgatattcccgaggcctcccgtctgagtctgagatgtcgccgcaaaagccgagcggcctgtgcacagtacgataaaaaacaatccgaatgcgatccatttttgatatgttttagacaattatgtctcctcctttttatcttcacttgccgttataaaaggaggaagctgacatcttcatcatcattcgccggtgaattcatgcggatgactttacgtatccaagttgtaatgcgatgatatataataataagaaagtctgttcggttcagctgaacgactgcttgatgttcatctattcgtttcgttctccaatgctcgcctgcgcggcgctcacgcaaaagaaaagcgatgccgatcgcggtcagagcgggaagaataattgtgaaaaaatcgactaaaaataaaaagtcattcattgactcaagaatcattttatcacatccattcagctcttattttactacatatatataaggttgtctatgaaaggaaaggaggcgccgggagtggccggaaaagggagaattatatttcatatcgatatgaacagtttttatgcctccgtagaaatggcgtatgatccgtctttaagaggaaaacctatcgccgttgccggaaacgtgaaggaacggaaaggaatcatcgtcacctgcagctatgaagcgagagcgcggggcgtaaagaccaccatgccggtgtggcgggcaaaacgcctctgtccggaactcatcgtcgtgcctccgaattttgaccgctaccggagttcatcaaaagaaatgttcagcattctgagggagtatacggatttagtcgagcctgtttctattgatgaaggatacatggatattacggacacaccgcacagacacagggcgtatgagacagccgaagacattcaggcgagactgcaaaaagagcttttgcttccgtcaagcatcggcatcgccccgaataaatttctcgccaaaatggcgtctgacatgaaaaaaccgctcggcatcaccattttaagaaaaagagagctgccggacgtcttatggcctcttccgattgaagagatgcacggtataggaacgaaaactgcggaaaaaataaaaacgctcggcatcaaaacgatcggtgatttggcaaaaggagatgaacatgcgctgaaaacgcttctcggcataaacggcccgaggctgaaggataaagcgaacggcatccatcctgcagaagtcaatcccgagcggatatatgaatttaaaagtgtcggcaactcatccaccctgtcgcatgattcggctgactgggatgaattaacgggcgtgtttgaccggctcgcgctgtctgtgagcgaacggctccagcgtaaggaggtcatggcctgccggctgttcatcatgattcggtatgcggattggaaaacggtcacaagaagcatgaccctcagcaatccggctgatcagaaaaaagacatcatggaagcggcgatggaactgtttgacaagcactggaaccaaaatccggtaaggcttctcggcatcaccggaacggaactggttgaaaaacagcaggcgtataaacagcttgatctgttttcattcaaggaggacgcaaaggatgagccgatttttcagatgatgaacgagctgaatgaaaagtacggccaaaacctgatcagaaaaggcgccgttataaaaaaagaagaaagcaaaacaaggggaacgagctttaacagagacttttttcaggatgaaaagaaaaggtgaataacttgaaaaaaggggttatgtatgataatttctttagtataaatatcattttattttaatttaaattttaaaatggttaaacgtttgaagaagggacgttagaatatgtcaaaacaacaaatcggagttatcggtcttgcggtaatgggtaaaaatctggctcttaacatcgaaagccggggattttctgtgtctgtatacaacagatcaagcagcaaaacggaagagtttttagaagaggcaaaaggcaaaaatgttgtcggtacatacagcattgaggagtttgtccagtctcttgaaacaccccgtaaaattttattaatggttaaagcgggaactgcaacggatgcgacgattcaatctcttcttcctcatctggaaaaagacgatattttgattgacggcggaaatacatactataaagatacacagcgccggaacaaagagcttgccgaaagcggcattcactttatcggaacgggtgtatcaggcggtgaagagggagcgctgaaagggccttctattatgccgggcggccaaaaggaagcgcatgaactcgtgaaaccgattttagaagccatttctgctaaagtggacggagaagcttgtacgacatacatcggcccggacggagcggggcactatgtaaaaatggtgcacaacggtatcgaatacggtgacatgcagctgatctctgagtcatatttcattttgaaacaggtgctcggattgtctgccgaagagcttcacgaagtattcgctgagtggaacaaaggagagcttgacagctatctgatcgaaatcacggctgacattttcactaaaaaagatgaagaaacgggcaaaccgcttgttgacgtgatccttgataaagcaggccaaaaaggaacgggtaaatggacaagccaaagcgctcttgacttaggcgtgccgcttccgattatcactgaatctgtttttgcgcgtttcatttccgcaatgaaagaagagcgtgtgaaagcaagcagccttctgtccggaccagacgttaagccggtcactgaaaataaagaagagctgattgaagcggtcagaaaagcgctcttcatgagtaaaatctgttcttacgcacaaggcttcgcccaaatgaaagccgcgtctgaagagtataactgggatctgaaatacggtgaaatcgcgatgatcttccgcggcggctgtatcatccgcgcggcgttcctgcaaaagatcaaagacgcatatgaccgtgaaccggagcttgacaacctgctgttagacagctacttcaaaaacattgcagaaagctaccaaggcgcccttcgccaagtgatttcacttgccgtagcccaaggcgtgccggtaccttcgttctcaagcgcacttgcgtattacgacagctaccgtacggcagtgcttcctgcaaacttgattcaagcgcagcgtgattacttcggcgcgcatacgtatgaacgcacagataaagaaggcattttccatactgaatggatgaagtaatgaagaagcccccgcagttattgcgggggcttttctaatattaaaaaccgcgggccgtcatgaacggcgccgcggtttttgatgttttcttatatattccaccagtggagaccgtctttttcaagaagatcgtccgaagctttcggtcccattgacccggcttcataattcggagaaagggttttgtcggctgcccacgtttcggaaatcgcatcgacgaaattccatgaaagcgccacttcgtcccaatgggcaaagtttgtcgcatcaccgagcagacagtcatggattaatttttcataggcttccggtgtgttcatttcatcactgcagttgctgcagtagtccagcttaatcggctgagcatgtgcggctccgcctaattttttagcgttcagatatagtgtgatgccttcatccggctgaatatggatgacaagcaggttcggatttacattcgtttcattgccgtaataaaggttcatcggaatgtctttaaattgaacgacgattttcgttgatttttctttcatccgtttccctgtgcggatataaaacggaacgccggcccagcggaagttatcgattaacagctttccggacacgaatgtttccgtattggaatccggtgctacattttgctcatctgtatagctcggtacagcgtttccgtcaatcgttcccgcttggtattgtccgcggacgaagaagtcacttacttcgtttggagcgacagggcggagggctctcagcaccttcactttttcgctgcggatttcttccgtgttcagtttaatcggcggttccatcgccaagagagcgaccatttgtaaaatatggttttgaaccatatcacggagtgcgcctgatttctcataatatctcgcacgatcctcaacgccgagatcctcacttgacgtaatctggatgtttgagatgtagcggttattccacagcggctcaaacagcgcattcgcaaaccggatgacttcgatattttgaaccatttgtttgcctaagtaatggtcgatccggtaaatttgatcttccgtgaaagcttcgcgtatttctttgttaagctctttcgcactcggcaggtcatggccgaacggtttttcaatgacgagacgtgaccagccatttgtcgctgtgacaccttcgtttttaagtgattttgcgatagtgccgaaaaactcaggagccatcgccaagtaaaacattctgttgttcgggatttcatatgtatgttcaagctgatcaagcaggacattcagctcctgataggaacccggattcgttacatcaaacggatggtaataaaaatgagatgtgaaatcgtctatgtctttttgcccggcagaagaaacagacgttttaacggtttcccggaggtcctcgtttgaccaaggtcttcttccaacacctacaactgcaaactcttcaccaatttgaccatttttatataaacggtgaatggatgggtaaagttttcgttttgccaaatcccctgtggcaccaaatattacaattactgcttttggtttgtcgtttgttttcacttagagtacctcactttatctgaagcatggtttaaaaccccgcatatttccttcattttaaatctaaaattcgttgaaagcaaacatttcagcctgttttttgcggtttgcggaaaaaaattaatcaggccggagaaggcccgggtgaattcacattttcagcctgatcctgtatccttagtagtacaaagatctaggaggaagcattgtggaattattatttttagggacgggggccggcatgccggcaaagacgagaaacgtaacgtccgtcgcgctgaagcttcttgaagaaaggcgttccgtatggctgtttgattgtggagaagccactcagcatcagatattacatacaacaatcaaaccgaggaaaattgagaagattttcatcacccaccttcacggcgaccatgtttacggtcttccgggtctgttggggagccgttcatttcagggcggtgaagaagagctgacgatttacgggccaaaaggcattaaagcctttatcgaaacaagcctgaacgtgacggcgactcatctgacgtatcctcttaccgtacttgaaatcgaagaggggacggtttttgaagatgagcaattcattgttaccgcagcatccgtcattcacggcgtggaagcgttcggctaccgggttcaggaaaaggatattcccggcgcattgcaggccggcagattaaaagaaatgaatatcccgcccggacccgtctatcagaaaatcaaaaacggcgaaacggtcacacttgacgatggcagaatcattaacgggcgggattttttggaacccccgaaaaaagggagaatcgtcgctttttccggggatacgagggtatcagagcgggtaacggagctggcgcgcaatgcggatgtgcttgttcatgaagcgacatttgccaaggaagatgcaaagctcgcacataattattatcacgcgacgacagaacaggctgcgcaaacggcaaaaaaagcaggcgccaaacagctgatcttaactcatatcagcgcaaggtatcagggtgaatcgccgatagagcgtctcgaacatgaggcgaaagcggtatttgaaaacagtaagatcgcatttgacttcatggaggtcactgtggagcggtcttaaaaaatggacgcttgacatttttttctggtgagatataataaaacgtaataattacgatttgcacaaggggtgaaaatgatgcgtgtgaatgttacattggcctgtacagagacaggggacagaaattatattacgacgaagaacaaacggacgaatccggaccggttagaaatgaaaaagtattccccccggttgaaaaagtatacgttgcatcgtgagacaaaatagatcacgataacaaaagccattgtgccgttgcacaatggcttttgttttatcagtttaccgcctgataggcaggagcattcatttgctggcgcaccgcgcaccaaacatcataaatggcaaggtggacgatgtgcggttcatcgtggtgaatggcatgagaactgtttttggcctgaatccatccgctttgataagagacatcaagcatgcttctgtgcagtttcacccattgttcatgagcgtgctttaaacgctcatcccgctctcccgatgataaaatcaacagcggcatatcgccgaaatgaatctgctgatgcttgatctgacgaaggctcgtcaaaaattccgcgtgtgatccttccaatatgaactgtttcaaataggcggctttcatttcttcgggaagaagcggaagcactttcgtctcctgatcctcagaaaccggatcaagcatcaccatcccgagaatatcccggcggttccggctcgcccaaagtctgctgataatcgcgccgtatgaatgcgagacgacaagataaggaggcttgacgccggccttcagaagaagagcgtttaattcctgtaccatgtggtccgccgttctcttgtttcggctttgtccgcttttgccgattccggctctgtcatatgtgaaaaccccaaattcttcatctatgtcagcgagtaatgatgtccatgtttcagaagaagtgccgtagccggcttcaaagacgatcgtcacttcgccggcgcctttacggtgtttcgtataaaacggacacccgtcaatcagatatgtcctttccatccatgctgctttcattggagtcatcccctctaattggttctatagggaagacggagaagcttcggcaatcgtttctcaaaaaataaaaaaagagacagccggatcgaaaaactccggctgtcatttcatcaccatgctctgtcgtattgaaccggtgacggtatttcagtattcagctgcttcgctgcactccttgcaaagtgcggatcgcgcagaagttctcttgcgacaaaaataaggtcagcgcggttgttttgcagaatttcttccgccattgttcccgtcgttatcaaaccgacggcgcctgttgcgatttcggcctgttcacggattttctctgcgaagctcacttggtagcctgggaagacattaatatcagcttgaacgagtgcgcctgagctgcaatcaatgaggtcgactccctgttctttcatccacttcgcaaaaccgatatgatccgcaatgtccagccctttgtctgtataatccgatgcagaaatacggacaaataacgggccgtcccagacttccttgacggcttcaatggtctcgcctaagaagcggtagcgattttcatgtgagcctccgtattcgtctgtacggtgattggacagaggggacaaaaattcgtgcattaagtagccgtgtgccgcatgaagttcaataatgtcaaagccggcttctttcgcgcgcgccgctgcctgtttgaattcctgaatggtttctttaatttgttctgtcgtcatttcagccggtgttttggactgctcatcgaacggaatggctgacggagcgtaaatgtctccctcaagctcagctttacgtccggcgtgcgcaagctgaatgccgattttagatccttgcgctttcacttgttccgtcagtttggcaaaaccttcgatatgatcatcgctccaaatgcccaaatcctgatcggaaatgcgcccctgaggattaacggctgtcgcttccacgataatcaggccgacctgtccgattgcacgcgatatgtagtgcgccatatgaaaaggctgcagttttccgtccttctcatgtgaggaatacatgcacatcggtgccataacaatacggtttttgatcgttacatctttaacggtccatggtgtgaataattttctggccatttatttcgcctcccggaatgtttttagacattgattataacaactcatgatcattcagtcatataaactgctcacgactgagcgcattgttattattgttctggacgggcatttttttatacacagcgtagccgtatcttcataacaggcatttacagccgatcatatagcaaatatagatgagaaacgcaccgatgactgcgtggccacctttgaaccagtttgtcaggatgaaaatactgctgatgaagatcactgcgccgaaggcaccgaatattccgtttttttgagcggctctgaaatcgtcggggctcatatttttcagctgcaagtgaatattcagtaacgtcatgatcggcagcaatgtaataacgcctgataagaataagtatttcgatttgcttaaatacgcggcggccaccataacggtgccgccgataaaaaattgaatgagaaaacccatgctgaaacgctcaccttctgtttgttatcaagtataatgatggagacattgccattttatttttgattgatgtataagtaaactaaatataactaatgcattggataataaagaatgatatctgggagatgaagccggttggatttaaagaagcatttagcctttattaaaacggttgaaagcggcagcctgacccaagccgctgccatattgaattacacacagccgaacatcagccaaatgatcagtaaattagaggaagagtacggttttccgcttttgatcagacagcggcatggagtgaggcccaccgcaaatggcttgaaagtgttacatattatgaaggaaattcaaaaaaactatgaaaaactgtctgaaaccgttgataatattaatgggttagaaagaggggaagtccggctcggcactgttacgagcgtggcggtaaaatggctgccgaaaattttgagggaatttaatgagctgtatccttccattaaggtgcatttgtttgaaggaaattctactgaactggaagaatggctgaaagatgaccggattgatgcggcgatcggcacatcccacagcgagaggtggcatttttacccgttggccgaggatcagattgtagcggtgatgagcccgcagcatgaattggcgcaatgtgaaacggttccgttacatgtcatggagtccgtcaaatgtatcgtgccttatccggagacacattttgatgtgctgaaagtgctgaaggaagaaaagattacgccgcgggtcgcttatcaaatcagaggggatgaagcgattattgcaatggtgcggaacaatctggggatcagcatcttgccgcagcttttggtgaatgattgtgatgtgctcatcaaacggttcgaccggtatgtctccaggcagctcggcattttgacagctcatgcaaaggagacgcagacaccttctgtccagaaactgattcaatgcatacaagaatgggttgcggtccgtcaggcttctgtctgaagaagcctgatatgcgtttaagccggttcagcataatagaccagcataaaatatgtcaccggttcatccgaggaattaaaataactgtgcggcatcgcccgaagtcagcacatgcttttcgtcatgaagctcaaccgtcaattcaccgctcttgattaaaatgtatcttcccctaaatgtgattttgcctcatgggcgcagcccggctttaggtcaactatgtcaaaaagtctgaccgtgacggtggtgagcggggttattttgatgtcgggctttcgtctgtttatataaaaaaagcatcaacggcacatgctgttgatgctttttttgatatgctagggtttggagagcacttcaattccgacgttgaccattttgtccagtcccataaaagacaggcagattttggcgcgtctttttcttttatcgatctttttaataatgccttccattcctttaagaggccctgaggcaacggttacttttgaattttcaatatagacttttgaataatctacagtgtctccttctccgatcagcctgataatagggaggatttcttcatccttaattgtcgtgaaataggttttacgctctttggaataatatgcgccgttattcacgattctgcatgaaatggggagttctttgattttatgaaatgtccgctctgtcatcttcgttttaaacagaacatatcccggaaacatctttttgagtgcctcgtatttgattccggcttttcgttctgtgacttttttcttgggtatgattgagtagagagcctgctcatcaaactgcagacgcagaaatttttgaactgtttcttcttttccggactctacaaaaagtgcgtaccatttcatgactgggtcctccttagaataataagaaattattatacaaagaaagtatttaatggatagtatttaaagtgattaaaaatttttctaattcgtcttttttttacataatatatgaaaatgaaaaataagtatagacccaattgacagagaagcgatgaattttctttgacatgaatagggttcagggaattatctgacatttatcccgaaacaattatgccgactgtccaccgaacataaaactgtgaaataaatgtcagaaaataatgaaataattccttgacattattatctataaattgatattattctctttaaatagcaactatttgttaaatttattaaattgatgtaaagcacctattaaatttcaatcgctgtttcggcacgttgaagaggaaatagggattataaaaatgattgtagtgtatatatctacatatacatgataagggagaagtgtgccgtcatggctgttttcgggcatattggcactgcagcttgtcatgcgaaacattcagtaaacaagcaagatgtctttatataaattatgttagaaaaggaaaacacaatgcgtttgcgatttttaaacctgtgctgaatcgcaaacgcgtttgtgtttttatttttatgccggtgtttacaccagtcaatatatgaaataagagacgtttttgtatggagaaccacatgtgatgtacaaaattggcgatgcggaaaggatgaggataagatgcttacgtttgtgttcccggggcagggttctcaatttaaaggaatgggagccggactgtttgatgaatttcaagatctgacacgtcaggctgatgacatattaggctactctatagaagaattgtgtctggaggatccgaatcaccagctggggaaaacgcaatttacccagccggcgttatatacggtgagtgcactcagttatttaaagaaaatgaaagagtccggcagagagcctgattacgccgcagggcacagtttaggagaatataatgcgttatttgcggccggctgctttgattttgagaccggtttgcagcttgtgaaaaaaagaggggagctcatgagcaaggcagctcccggaggcatggcggcggttttggggtttaccgctgaacaagtaaaagaggttctatccgattatcatctgaccggcattgatatcgctaaccacaattcaccttcgcaaattgtgatcgccggaacgaaacaagacattgaaaaagcgggccccgtctttgaaaaagccggcgtgagaatgtaccttcctttaaatgtgagcggcgccttccattcccgctatatgaaagatgctgaaaaagagttcgcggattatttagaagaaacggtgtttttgcctcttcgttttccggtgatctcaaatcttcatgccgcaccttataagaatgatgaaatcaaaacaaatctgactttgcaaatgaccaatcaggtaaagtggacggacacgatacgccgtctgatgggacttgaaaataatgaaattgcagaagtcgggcccggagaagtgctgacaaaactgacgcgtcagattaaaaaagatgccgtcccattacctatgccgaaagaagagtctgatactgctgatgttaaagcatcggcagctgatccgcaaaaaacggcgggaatgagattagggaacgaagattttaaaaaagattataacatccaatatgcttacatgacgggctccatgtacaggggaattgcttcggaacagatggtcattaaagcggcaaaagcgggaatgctgggctttttcggaacgggcggattgagtatcgaacggatcggacaggccatcggcaccatccggtctgcactgcggcaaggggaaacattcggaatgaatcttcttcatcatatgatgtcacctgacaaggaagtcagaatgatagatttatatttgaaaaacggcattcatcttattgaagcatcggcatttatgggcataacccccgctcttgttatatacagggcaaagggattaaccaggaatcatgacgggtcggtgtcagttcaaaacaaaatcatcgcgaaagtatcccggcctgaagtcgctgaggcctttctgaatccggctccggctcatgtgctggaaagacttgtgtctgacaatcggctgacagccggggaagcggcgcttgcaaaagaaattccgatggctgatgacatttgcgttgaagcggattcaggagggcataccgaccaagggattccgtatacattaatgcctgctatgatcagactcagagaccgcatgatggagaagcacggttatgcgaaaaaagtaagaatcggcgcagcgggcggcatcggcactccggaagcggctgctgccgcgtttctgctcggcgccgaatttatcggaaccggttctattaatcaatgcacggtcgaagccgggacaagtgattcagtgaaagatctgcttcaggaagcgaacgtgcaggatacgtcatacgctcctgcgggagatatgtttgaagcgggagcaagggtgcaggtgctgaaaaaaggcctgtttttcccggcaagagccaataaactctttgacttgtacagacaatacaattctttagatgaaatagatgaaaaaacgaaaacattaattgaagaaaagtatttccagcgcagttttgaagaagtgtatgagcagttgaaacgtgataaatctcctgagcagatcgccaaagccgaacagaatccgaaacacaaaatggcgatggtatttaaatggtatttttctcatacgacaaggctcgctctggaaggaaaaagcgaaagtaaaatagattaccaaattcattgcggtcctgcgctcggcgcgtttaatcaatgggtgaaaggaaccccgcttgaaaattggagaaacaggcatgtcgatctgatcggcaaacagctcatggaagaaacagccggccttcttgcgcaaaggctggtatcgattacaggctgagtatgaccagccattacattttttctgcggaggacagaccatgctgattgaaaatcatgaattaacgatgagccatgtcgggttagggaatttgaatgagtacgcgctgctgctgttattcggcaacgcacacagtcaccatttaacggacggaacgggattccggcctgatcagatggccgatcaccaagggctgattttgtatccggcttattttatgacacatctcaaagttccttcagatcagcctcttgatcagtaccgattatgggacgaggtttccgtcggagtcgatatctcccggtttggagaaaccatattagaatctgattatttgttcgggccgaaaggagcggtcagctctgataaaagcgagtgggaccggggacggtttccttctatgaaagccaatagtttaattgtcgtcgacgtcacacaaacagaaggttcgacgcgcaaagtctcagcgcctaaggctgaatgcattgcggaactttctaagctagccaagccgccttacgccctgatgcggtcaaagaaaatcagaacggacgccttcggtatgaagccgggcaatctcaaaacagcagaccccgtttcatatcgggttcctgttgatcaggatgctgcgcccggacatgccatggtgtttgcgaaattcagcaagataatggatgcggcggaatttgaatggatgacgcgccggtcgaagccgggttttccggtttcaatcgcgcggcatttatttttgcttgaaagagagacgtattattacggaaattgttttgcagatgaagagcttgatatttatatgacgggacacattgaagagtgcgatcccgactttcacggtgagtccctcggtatgatctcagtggcgaaaatcagctatcagattgaagtctatatgaaaagaaatcatacattgctggccatttccaaggtggataagctgctggcggtgccgacctcttcacaagatcatattccggattataaacgggtcatcagaagtttataaaatgaagaatggagctgaaagcaaatggaacaaaccaaggaaatgaagcagatcatcgctcaaatcattcaggatattcaagaacagcagtcatatcgggccgtcgaagcgggggatgatgtgagagtcatagaggatctgggcttctcatcactggatatcgctcaattagtcgcacagatggagatggaaaccggagtagatcctttttcccaaggagaaacgatttccagcattacaaccgtcggcagcatttgtaatatttatcaaaaatatatggacagtgctcaatcatgaaaacagaaagcaggggagatatcagctgggtgactgataagcttagggaaacgcaagacagtgagtttctcatttttaaagggcagacttttacgtatgatgatttgctgacacgaatcagcttttttcagaaagaacttaaacaaaacggaatacgtgaaggagaatgtgtggcgcttatcggggattattccccgaacgccatttttttgctgatggcgcttttgttaaaccgaaatatcgttgtccctctcagcaatgaatcaagggaaaagcatctcgatatgtttgaagacgcgaaagtgaatcaaatcattgaaataaatgaaaatgacagctggacgcttcgtgaaggttctgaaagcgcctctcaccctctgcttgatgacctgcgcgagagagaggagtcaggcattattattttcacatcgggaacttccggcaaaagcaaagcatccgtgttaagcgccggccggctgcttgaaaaatataaaacggcgaagagaaaaccgctgcgtacgctcatttttctgaaattggatcatatcggcggcattaatacgctgtttgcgattctgtttaacgggggaaccatcgtcacatcagacagcagaacgccggagtccgtttatcaggcggtcgacaagcatgctgtccaagtgctccccgccaccccgacctttttaaacatgctgctgatgtccaaggcggatgccggctataacctctcttcactccggctgatcacttacggcacagaaccgatgccccaatcaacgctgcgcggcattcaccggctgtttccggatgtacggctgaaacaaacatacggattaactgaactgggtatattctcaacgaaatcaaaagacagccaatccacttggatgaaagtaggaggtgccggaacagagaccaaaattaccggaggcacgctttgggtccgttctgagtccgcgatgctcggctatttaaacgcaccgtcacctttcgatgaagacggctggtatgacaccggtgaccaggtggaaacagacggcgaatatataagaatccttggaagaaagagtgaaatcattaatgtgggcggagagaaagtgtttccggcagaggtggaaagcgtctttctggagataccgaatgtccgggatgttctcataacaggcagaaaaaatccgattacaggcgagattgtcgcggcagaggccgtgctcgaaaaagaagaagatatcaaatctttcagaaagcgggccgtagctcattgcaaacagaagctgcagccatatcagataccgcagatcatctctgttacagatcggaaactgtctaatgatcgatttaaaaaaataagaaacgtgtaaaacaggaggcaaatatgaataacggaaaagtagcggtcgtcagcggaggaagccgggggctgggaaaagcgattgtacagacgcttttggatgaggattacatagtagccgctttcagccgcagtgaatctgattttattaacacattgagagagagtgaaaagtaccgcggccgcttttattgggaagcggcggatgcggcggatgatgccgccatgaaacagtttgttcttcaagtataccgcaagttttccagaatagacggcttggtcaataacgccggtttgaaccttgatcagctgctgcccctgaccaatgatgaagacattgaccgcatcctcaatctgaatatcggctcagtcatcaagctgacccggaacgtttcccgtgtcatgctgaaacaaaattccggatcaatcgttaacataagctccattatcggctcaagaggatttaaaggcacttcagtctacagtgcatccaaagcggctcttgacggcttgacgcgaagcctggccagggagctcgggtctaaaggaatccgtgtcaattcacttgcgcccggttttgtggacaccgatatgacgaaaaatatgccggaaaaacaaaaatcgcagattatcagaaggacgccgatgggacgtttaggtgaaacagacgatatgaccggactcgttcgtttcctgctttctcctgaatcgtcctttatgaccggacagacaatggcaatagacggcggattaacttgttaaagcacagaaaaattcttttgtacaagggatggtatcctcatgaaatgtattaacgaatttttaagaacggtaatagcgcaaaagctgggtgccgaggtgaccgaagcggaagataaaaccgctttttttactcttggcgtgacgtctctcatcagtgaagaaatcatgaccatattgcataaagaatttaccggcctttctgaaacgctgctgtttgaatatccgaacattgagaaattgagtgagtttttaagtgcgcagaaacgaaatcccgaaagcgttcttgaattcacagaaacggagcctgataagggaagccggcaggaagaagaattgcttcccgtacaggcggctgaaaaggtgcctgaaccggcaacggacgggagctctgatattgcggttatcggaatgagcgggatgtttccgaaagcggaaaaccagcatgatttttggaacaatttaatggaaaataaagattgtgtcactgaaatcccagaggacagatgggacagctcttattactcggaagagaaaacggcagaatacgcttcatacagtaaatggggaggttttattgatcatccggatcaatttgacccgctgtttttttctgtttccccgtgggaagctgatttaatggatcctcagcaaaaattgtatgtcacgtgctgctgggaagcgatggaggatgccggttacgggaatccggcggcgaggccgacggatcaaatcggtgtattcgccggagtgacctggaatgaatattcattaattgcacacgaagaaggtttcctcaaagatcagtacaaaggccccggctccttatattggggcattccgaaccgggtttcttatttccttgatctccatggcccgagcatcgctgttgatacggcgtgttcttcatcgcttgtcgccgtccatcaggcttgtcaggccattatgtcgggcgactgtgaaatggcgctggccggaggcgtcaacctcagcttacatccgcaaaaatacatgtttttaagccaatcgcattttctgtcttctgaaggaaaatgccgcagtttcggtgaaggcggagacggttacgtgcccggcgaaggcgcgggagccgttttgttaaaaccattgaaaaaagcgattgcggacaaagaccacatctacggtgtcattaaggggtccgccactaatcacggcggcaaaatgaccgggtatacggtgccgaatccggaagcgcaccgggacctgattttatccgctctaaacagagccgcggtaagtccggcggatatcagctacattgaagctcacggaaccggcacggcactcggcgatccgattgagatacgcggcctgtctatggcatttgataaacagaccgatgagaaaaactactgcggaatcggctcggtgaaatccaatatcggacatttggaagcggctgcagggatcgccggtttaatcaaggtgcttttaagcatgaaacatgaaacgcttcccgccagtctgcactccgaggaactgaaccgcaagatttctttttctgattcgccattttatgtcgtccgaaacaaccggccgtggccggctgaaggagataaaccgagaatcgccgcaatcagttcattcggcgcaggaggctctaatgcccatctgatcgtaggtgcttatcagccaaaacggcaagcggacaagaatactgagcaaaaaccgcatgccgtcgtattaagcgcacattccgaacagcagctgaaagaatatgccgggaaattgagctcctttcttgcccgtttggaaaacctgccttctgccggcggatacagtctggaaaatatcgctgccaccttattgtcaggcagagagcctttctccttccggcttgctgtcattgcatcatccctttctgagctgaaacagcgattggacggatttgtaagcggtcacagcgacggcaggtatatgtacttcggaaaagcgtcacacgggcggccggacgtttcaggccaatccgtttcagatcctgagaaatttgccgcgctgtgggtgaaaggccttcaaggttgcaaaaagccggaaacgccgtatcagaaagttccgcttcctacgtatccgtttttaaaggaaacgtcctggctgaccgatcaaaaaaagcggtatacaaaaaagccccaaaatatcaaaaagcgtgaagcgctgcatcctctgcttgatgagaatatttcatccgcccggaaagggacgtttcaaaagatattttccaaggatgaatatttctttaaagatcatttagtgaacgaaaaatatgtgcttcccggagtctgtcatctggaaatggcggcatacggcgcgggattgtggggagaacgcccggtcgtctctcttcaaagtgtgtggtacatggagccgattgtgacagggacagacccaagatccgtcatgatagagtttgaagcagaaaaagagcgtataagctatgtcattaaagaaaaaggagcggacggcaccctcttttcgcaaggagaagtgatttgtaaagaaaaagggacgtctttagaggccccggcctttcagctcccggcgccatttgcgcagagaacggagccggaagacatctatcactcgttctctgaggcgggaatcgtgcaaaaggacagttttcaggtcatccgcgaattctcttatacagaaaggaaagcactggccaaattaacgctcccgtcacacttggaagccgattttaaacagtacatcctacatccgtccttaatggatggcgctgttcaaactgcaatggcgcatgtgctgcaatttcaaaaagagcctgcgcttatcgtaccgttttccttcggagaaatacagctgcttgaaccgttagcgaaaaccgtatttgtgtatgcggaggtaaaagcggcctccgttcaccaatttgatctgcatatttgtgatgagcgcggcgtgctgttggcggcagtgaaagattttatcataaaagaggtgcaggaaagcgccggctttaaccaaaaagccggcgtcacgccgaagaaaagccgtgaaacggaattgcttatgacaccggtttggaacaccgtcaccattccggaaaccggcatgtctttcatgcgtgaagaaaaaataatcgtcatcggggccgggccggattttcagcagactttgaaagagatgtattccgatgtccgttttccggtcatcacttctttggacagcgcggaacaaatggctgaaacattgaaagcgcaaggctcttttcaacacatgatatgggcggcgccggatcatcccattccatccgtttatgatgcggatacggccgagggacaggagcacggggtcatgcagcttttccggctggtaaaagcgcttctgcttctgaattttgacatggaacaactatcattgacaatctgcacgtttcaagcacagccgattcatgaacatgatgaggtcaatccgagtcatgcaagcatacacggattagcggggtcgctcgcaaaagaatacaccaattggagcatccggcttcttgatttggaatctcaaaggggagaccggcatctccccgatgtcttctctttaccggcggactccgagggaaatccgtgggtatttcgtgcaggtcagtggcaccgccagcaattggccgtctgccagcctcatgcagatgagccttcattataccggcacggcggggtttatgtgattatcggcggagcaggcggaataggagaagtatggactgaatatatgattcagacctatcaggcgaaaattgtctggatcgggaggcggaaaaaagatacacagattgaaagaaagctgaaaagacttgcggctttaggccctgcaccgcaatatttcagcgcggatgctgccgattatgactctctcaaacgggcgtatgacaccattgtaaaggaaaatggaaaggtccgcggaatcatccattccgccatcgtgttatcagaccgaagttttgccaatatggaagaggatcagttccgcgcgtcactttctgcaaaaactgatgtgagcttgcagattgcccgggtagctgaaggggaacccctggatttcttgctgtttttctcttcgatgatgtcgtttcaaaaagcgccgggacagagcaattatgccgccgggtgcacgtttaaagacgcttttgctaagcggatctcacagaaagcgccgtatgccgtaaaagttgtcaattggggcttttggggaagtgtcggcgttgtcgcttcagaacaataccggaaacggatggagcgggccggaatcgcttctattgaggcgcccgaagcgatgaaaacgctggaaaccctgctttccggacctcatgaccagctggcgctgatcaaaacgacagatccggtttttatgaaagacgatctgaaagaacaagtaacggtttatccggaaaagattccttccgcactcggacaattaacggttaacatcacgcagaatgacgaagctgagcggttaaaagcatcaagtgtcatgagctgcatgagagagatggagtcccttattgaaaaaatgcttgtatcaaccctttatgagatgggagccgggcttggtcaggctttgccgttatttcaatcggctgccggcataacggaacaatacagcagatggctgaaagagagctttgtcctcctgaataaattagcgcttactccggaaaaaacggatctagggcaggtgtgggaggaatgggagcggaaaaaagagacttggctgcgccagaaagacatgagggcgcatgtcagattggcagaagagacattgcgtgtgcttccagacattttaaccggtaagcttccggcaacggaagtgatgttccctgactcctctttccgtcttgtggaaggcatttaccgcaataatatcatttctgattttttcaatgacaagcttgctgacacattgattgcagttttgaaggaacgtctggaaaaagacccgcaggcgaaaatccgcattttagaaatcggagccggaacgggcgggacgagcgccgcggtcatgagaaaattgaaaccgtatgaagcgcatattgccgaatattgtttcacggatatttctaaagcatttcttttacatgcagaagacatattcggtccggaatatccttatgtcacttataaaatattcaacgctgagcagccggtatcaacagaagcgccggacatcggcacgtatgacgcagtgatcgcgaccaatgtgcttcatgcgacaaaaaatatccgctctacgctgcgccatgcgaaagcaatgctgcaaaaaaacggccagctgtttataaatgagatcaacagccgtaccatattcaaccatgtgacgttcggccttcttgaaggctggtggctgtatgaggatcatgatttacggattccgggctgtccgggggttaatccggccggctgggcggaagcgctttcgcttgaaggattcgtccatcctctgtttccggctgaagccgcacacgacttaggccagcagattatagcggctgaaagtgacggaacggtcaggcttgccctcacgcaggcgtcagaagagaagccggagcgccgtccgtatgacgcagaaggtctttcggatgatactttgcatgtcagcctgagagaaaaaagcgttgaactgatgaagaaggtaatcggtgaagcgcttaaagtgccggcgcatcgtcttttatcccatgaacctttaaccgcatacggattggattccatactggtcgtcagactgaccaatgcgttaaaagacgtcttcggttctgtcagcagcactttattttttgaatatcaaaccattgatgagcttgctgattactttctgtcttcccgtaaagaagcgctcgagcggcaattcgggaatggacgggctcatcccgaaaacgccggacgggtgcaggctcccgcagaaagcgccacgccgattccaaacgtaagagaacggggcatcgcatatctgacggaattaataggaaaaacgttgaagattccgagcgggagaatggatccgtcggtttccttaaccgcatacggtttggattctattctggtcgtcaggctcacgaatgcttttcgtaacgtgtttgaccaaatgaccagcaccctcttttttgaatatcagacgatagaagaaatcgcggattacctgcttctttctcagcggggagcatttatgaaagcgatgggtgtgcgtgaagagcagctgtctgatcacacagataacctgaatgtaaaacaaaacaaaattcctcaaaacgaggaaggcagcaggacgaacggagatccctatatccgggatatcgctgtcatcggtctgtcaggccggtatccgggcgccgatcacgttgatgagctgtgggaaaatgtaaaagccggcaggcattctattactgaagtgccgaaagatcgctgggactggaaaacgttttataacgaggaacgcggaaaatgggggtccatttattcaaaatggggcggttttctcgatgacattgataaatttgatccgctgtttttccgtatatctcccgcggaagctgaaaggatggatccgcaggaaaggttgtttctgcagactgcttattcaagcattgaagatgcggggtacaccccggccaccctttgtgacagccggaaaatcggagtctttgtcggtgtgatgaacagcaattacccgacagttcccagcgactggtctatcgcaaacagagtatcgtttttgttcaatttccaagggccgagtatggctgtggatacagcatgctcttcttctttaacagctgtccatctcgccgcagaaagcctgcggagcggaatgagtgaaacagcgattgccggcggagtcaatcttatcgttgatccggcccactatgagcggctgtccgctttttcaatgctgtctcccggtgataaatgcaaatctttcggagacagtgcggacggttttgttgacggtgaaggagtaggggcgattgtgttaaagccgcttgctcaagcggagaaagacggcgatcatatttacggcgttattaaaggaagcatgctgaacgcagcaggcaggacaaacgcttatatggtgccgaatccgaaagcgcagtttgatctgatcgcagagacgttgaaacggacagacattcacccgagaacggtcagttacttggaagcccacggaacgggcactgcgctcggtgatccgattgaaatcgacgggttaacgaaagcttttcgcctgacaacagaagaccggcagttttgttccatcggttcaattaaatcaaatatcggacatttagaaagcgctgccgggattgcggggatcaccaaactgcttctgcaattgaaacataagaggattgccccttcattgcatgcggcggaattgaatccgaatattgagtttgagcacactccgtttttcgtacagcaaaaagaaacggaatggaagcgacctgtcttgaatatcacgggtgaaatgaaggaatatccaagaattgccggcatttcctcgtttggagcaggaggttcaaacgcgcatgtcatcattcaggaatttgtgccgtctgacagcctgaaaccaatggaaaacgcgtctgtttctccgcaaaaaccggctgttattattttatcagctcgaaatgagcagcaattgacagagcgcgcccgccagcttctggatgatgtcataggaaaaaaacgttctgacggggatttagccaagatcgcttacacgcttcagacgggaagagaaccgatggctgagcggcttgcatttacggccgagtcgatagaagaactgaaaatgaagcttatgagtttctcaaacgatcataatatcgaacatgctcatatctggcggggcaggacagccaaacatcattcattggcggcttcactcacttctgatgaagatatggcgcttaccataaatgcctggctgagaaaagggaaatacggaaagctgcttgacctttgggttaaaggacttgacgtcgattggtcagctctttatcagcgcaacccgggccgcatcagtctcccggcctacccttttgccaaagaccgatattgggtcacaaaagctgatgtgtcacttgacaaaacaggctcagcgaaaagtgagaaagcagccagacttcacccgctgctccacacgaatacatcgacctttaccgcccagcgttttacttctgttttttcaggatatgaaccgttttttgccgatcacatcgtcaatggaaaaccggtgcttccgggcgcggctgctttagaaatggcccgggccgccgttacgctggctgctgaagacttgcccggcgggaaaacgggtgtaaggctcaaacagatcgtttggctccgtccggtgacggcgctttctgaaggagtgacgcttcatgtaaagcttcagccggaagaaaacggagacatcgcttttgaagcgtatgccgaaggagaagagccgcttgtctttttccagggaaaggccgtgctcgaagagacggaacgtgctcctgttctcgatgtagaagctgtggccgatcaccctctcaggtcggctacgcatcgtcgccttggtgagccgttacctcaccaactagctaatgcgccgcgggtccatctgtaagtggtagccgaagccaccttttatgtctgaaccatgcggttcagacaaccatccggtattagccccggtttcccggagttatcccagtcttacaggcaggttacccacgtgttactcacccgtccgccgctaacatcagggagcaagctcccatctgtccgctcgacttgcatgtattaggcacgccgccagcgttcgtcctgagccaggatcaaactctccgataaagtagtttgactgactacgcacatcgctgtgcgatttatttaaaactttgaattaacaggtacgttttgtcttgtttagttttcaaagatcattaccgcttgttgaagcagctttattatcttaccactcagcttcttttatgtcaacaacttttttcaagttgtttccgaagctttttgttgttgtctgctgttcatcagcgacgtttaataatataccatgcattcgatgaatttagcaagtgtttttttcgttttttttaaaacgtatttcgttatattcatctccgccgcggcatacgatgtaatcaagcatggacaagataaggaggcgtcatcagtgaatcacttctacgtgtggcacatcagaaggataaaacagctgcttattattatcattgccgcatttgcagcagccagctttttttatatacagagagccgtcccccttcctgtatttttaactgatagcggcccgaaggctatttcaaaaggggagacgaaagcgggcgaagtcgcattaacattcgatatcagctggggcgacgaaaaggcggttcctattctgaacgcgctaaaagcaaacggtattaaaaacgccactttttttctgtcagcttcttgggcggaacggcacccggacacagttgaacgtatggtaaaagacggacatcaaatcggcagcatgggatatgcgtataagaattataccaacctagaggacaatgaaataaaaaaagatatcctccgggcccagaccgcatttaaaaagctgggtgtgaagaatgttcatttactccgcccgccgaccggacaatttaataaaaaggttcttaccattgcacagcagtaccactattcagtggttcattacagcgttaactcgcaggattggacaaatcccggtcctgataaaatcattgaaaatgtaaacagtcatataaaaggcggcgacattgtcctgctgcacgcctctgattcagcaacacagactgaagaagcgctccccgccattattcacaatttaaagcaaaaaggactgaaaaacgtgaccgtcggcgacctgatcgcaaatactgacgtcaagtcatcagaagtgaaataactacctctgggcaaacttcggcagcattaacagctgaaacgcattgcagcccatcagcggaatcagcatcaaataaagccagtcctcattattcactcgtagcgcaggaacccattcaagcgctgtaataacgaccattaaaaataatgatgaaacgaacgtattttttgaggactgcttttgttttatatatgccgtcaacaggccgacggcaagcagagccagcggcagccagacaaaccctgcaatcgagtcatcccgctctccgaaaaacaaaaatctgacgtacattaaatcaaaagcgacaaacagaatgataaacagctgaagcagattccaaagcgagcttgatctgagaatttcaagggcaaaccggtgcaccgtcagaaaaacgaagaatcccatctggctgatcacactgaaaatcatgcctaccccgataaaccagatcagaacggagaaaatctgaccggcctcaaaattcagaaagaaccccttgtactccccccacttcagagcaaatcccacgacgcttgtaataagagcgcccacagctaaaatcgaaaagaaaaatcgaacaagcccgcggcttttcatctcttattcatccccctgacaatcgcgttcagcgatattttgttatgtataaatccattccgatgaatcatattaaaaataagtacaagtaaggaaggagcttatgcatgtcaaaagccaaaacgctattgataagctgttttgttttattatctgtaacagcttgtgctccaaaagaccaagcagcggatatggattatgaccagactaaaaaaatggttgttgatatattaaagaccgatgatggaaaaaaggcaattaaggaaatattaaatgatgatgcgatgaatgaggcattggtgattgatcaaaatgccattaaaggcacaatagagaaaaccctcacctctaaaaaaggggcggagttctggaaaaccatctttgaagactcaaaattcgccgagagctttgcaaaaactcttcagcccgagcatgaaaaaatcataaaaaaactgatgaaagaccctgattatcagaaaagttttatgcagatcatgcaggaccccgggatggataaaaaatactatgagctggtgaaaagccaaaagttccgcagttacttagaggatgtaattacagagacactttccagcccgcttttcaaaaagcaattcgaggatgaattgaaaaaagcagcttcaagctctgaaaaagaaagccaataaaaggccgggccgtgttgatcccggccccttttttattcagctgttttttcaatgactttctgggcgatccccatataaatttccccgatcggatgacttctgtcatagacagaaggcgcaaactgatccttgtcccaatcaggctgttttaaaggaattctgccaagcagcggcacttgcaattcctccgcaagcttatctcccccgccttgaccgaacacatattctctctcgccggtttttgcactttcatagtaagccatattttcaatgacccctacaacttcatgatcggtcttaatcgccatagaacccgctctcgccgctacaaatgcggctgtagggtgcggcgttgatacgataatctctttgcagctcggaagcatcgtgtgtacatcgagcgccacatcacccgtgccgggcggcagatcaagaacgatatagtcaacctctccccagtcaacttcatggaagaagttattcagcatcttgcccagcatcggccctctccacacaaccggagcgttttcttcgacgaaaaagcccatcgacataacctttactccaaatctttcgacaggaagcagtttttctccttctactgtcgggcgaactgtaatacccatcatgtccggcacgctgaatccgtatatatccgcgtcgatcaagccgactttttttccgagccgcgcaagagaaatggccaggttgacggaaaccgttgatttgccgacaccgccttttccgcttgccaccgcaagaaagaccggcggatgtttcctattcagcagggtttcgctttcagcagccggccggctgaatttcgccaatgtttcttccggcagctcttcaaaccgcagtcccacagtttccgcacccgcttctttcagaacggatacgatttcctgctgaatacccatctgttcagccgtccccgtttttgccaatgcaattttcacactgacatgccgtttttccggcttgatctttacttctttaatggcatccaattctcccagcggtctatgaagaaaaggttcgcgcatgtttccgactatatttcttacttcatcttctcttatcatcgaaccctcaccctttgtgtattcgtttacaaatggtattataccatatattaaacatagaatcggcgaaaaaccctccttactcgggagggtctcctttctctgtgaagtatctcaatacgcccttatacacggaagaagcgattttgtcctgatatttgggctggccgagccttttcgcttccgcgggattggacagaaaaccgatttccaccagcgcgcccggtttggttacattctgcattaagtaaatgccgtgtatccgtttcgcctttctcgttgtattctccaaattgattctcaattcgtcctgtatatattttgccactttttcattttcttcgtattttccatagtagaagctttgggcgccgctccatctcggtgacggtatggcgttcagatgaatgctgatataaagctccgcctctgaacggttgatgatttccacgcgctttctcagatcttccgctttgcgtctgctgtagccttttgtcccttcaggagctaaatcagtatccgtctcccgcgtcataatgaccaaagctccctgctcctgcaaatagtctcttaccctggaggccacttcgagagtaatgtccttttcaaggtgactgcctcccgtggcgcctccgtccggcccgccgtgtcccggatcgagatagatgattttcccgctcagcggcagactccacggccgccaggaatcatcattatggaattgaaaccggaataaacacaataatatgataaagccaagtaaaaaaccgagccatttcagcttttttgtcatacctttccctcccgcttgtccccgttattaataagtatgggacaagggaagaaattatgattacctcatgcggagcttacattgtttttctctttgcagaaatccttccgtccaccagctgttgataaaccggcaggacgcttcatagatttctttttgtttaacggaagaatattgctcatgcgtccaattgcaaagatattcaaaaaaatcgaccgtcagttcttcctcttcttcagccgaacgggcgtttgccctctgcaaagactcaccataatagccaaagacgccgaaccggccgcctaataaatacgcttcaattgcaaaatctatgcatccttcactcagaatgccgttttcgtcttgaagaaagggaaacaaaggggtaagacatgcttttacggactgaatgatctgcgtcagtgacagctcctttagtaaactcttctcaagctcaaaatccttctgccgtttcacgtctgaaaaagataatacttctgccattgccagccacgctcctttttactgttattttgaaaggaaaagggaaaaagcatgctttgttgatagtggaaatcctcccaaatgaaggagttttatgttaactggaagaagaaagaactgaggtgacgtgatgaaaaagctgtttcaatacaattggacggtgcgtgacgagtggtttatgatatgtgaaaagctgagccgggaggaactgacgaaaacccggacgggcggaatgaagagcatcttgcggactttatttcatatcattgatgtcgagatcagctgggctcgtgccattttaggtaaagatgatgttttacctgctgagtctgactatacgagcattcaggatctcagaaaactgtctgaacagtatcgggaggatgtcattcatgcggtctccctcaaaggaccggatcttgttaagccgggctggatggaccaaacctttcctaaagaagatattctccgccacatccttgcgcatgagattcaccatatgggacaactgtcggtttgggccagagaaattggagtagaaccggtttcggctaatgtgatcagccgtccgcaggaaaaagccgcaaaaaaacagcacctctgacgggatgccgtttttatattttaatgcttcttgttacggagtatgtattaatgtattcatccagcacgaggccgcctttgtcctcgtaaaaaccggcaaccatgaagcctgcgtcaatctgacctttaatttgatcctccagcgtatggccgaattcaagcgcttcatgattatcaataagttcctttacctttttcttactcagatctttttcatccgaaaacggaatggaatactttacttttagtacgccttcctgctctaaatccatatcaaataagaacacgacgggatttacaaaaccggagactaaagacccgccttttttcaatacgcgatgagcttctttccataccggaagaaccgtatcaacaaagcaattcgataccgggtgcacgataaaatcaaatgactcatcatcaaaacagctcagatcattcatgctgcctttgacagtccgaagcgtaagatcgtcccgctcggcaaccattctgtcttgcgcaagctgtttttccgaattgtcaaagatggtcacgtccgctcctgcagcagcaaggaccggcccttgctgtcctcctcctgaagcgagacaaagaaccttcagaccgtctatgggcggaaaccaatccgccggcacatcttttccgggggtcattctgatgctccaattgccttttttcgcttcaccaatcgtatgagaatcaaccgcaaccgtccattcattgcctgtttcgacttttttatcccatgccttgctgttatgtatgactaacttattcattataactgcgctccttattggtaatgaatagagtataacaaacaattctagaaaaacatcggataacctcttgaatatgagaaaaaaatacaaaaaaaccacaaccaagaagttgtggtttttgccatccaaaacgattaacgttttgagaactgaggtgcacgacgagcgcctttaagaccgtattttttacgttctttcatacgagcgtcacgagtcagaagaccagcacgtttaagtgttgcacggtattctggatctgcttcaagcaaagcacgagcgataccatgacggattgctccagcttgaccagataagccgcctccatgtacgtttactaaaacatcataagtaccagctgtttcagttaaagttaatggttgtttgatatcttcgattagagctggagatggaatgtgctcgctgatttcacgattattaacgacgatacgaccttcacctggaactaagcgcacacgcgctacagaacttttacgacggccagtaccgtaatattgaacctgtgccaaattggtaacctcctttttaattaaccgcgaagttcgtagacttcaggtttttgtgcttcatgtggatgctcagaaccacggtatacgttcaatttcttgaacatttgacgacctagagaaccttttggaagcatgcctttgatagcaagctcaagcattttctcagggtagtttgtacgcatttcaagagcagttcttgattttaatccgcctggatgttgagtgtgacggtagtagattttgtcagttaactttttaccagttaactcgattttttcagcgttgatgatgatcacatgatctccagtatcaacgtgcggtgtgtaagtcggtttgtgtttcccgcgaaggatagatgcaacttctgtagaaagacgtcctaaagtcttaccagcagcatcaacaactaaccacttgcgttcaatagtacttgcgttagccataggtgttgtacgcattgaatttccctcctaaatgatctgtcattttcaataatcttcgattacgttctatttcacaacacaataagttccggggcttatcgtggggttgaaatacataccatatgatatcttataactttatgcagactctgtcaagaaaatgttacacctggtttagttgtcatagcaaacgctccataaatacagcccgtgccccggtgcggtgcgccccgcggcttcgcgatctttcgcttcgagcattgcttttacatcatcgggagaaaattttccagctcctgtatccaataacgttccggcaatgattctgaccatattatagagaaaaccgtttccggtgatccgcatctgcaggccgtctccggtctcagtccaatccagctcgtaaatcgttctgactttatcctgaaccgcggtatcagccgcgcaaaagcttgtgaaatcatgtgtcccgacgaggtgccttgaagcttccctcattttctgcacattaagcggatatgcaaaatggtaagcgtaatgtcgtttaaatacgtccgggtgtttctccgtatatacaaagtagcgatattccttttggaccgcgctaaatcgtgcatggaacccatcatccgcaatctctgctgttttgacggcaatatcatcaggcagcagggcattgagcgcaaacggccatttctcagccgggatggacagcggcgtatcaaaatgaatgacctgcccggcagcatgaacgtcgctgtccgtgcggccggatgagtacacaggcactctgccgtccgttttatggatgacagccagcgctttttccaattcactttgaacggtccgttttccaggctgaacctgatatccgttaaataaatgcccgtcataagcaatggtacatttcactctcattcagcagcacctctaacttcttaagaaaaacaataacacggctaataagatgatgagcagaatagctccggtatcctttccggtccagacgagctttctgtatttcgttctcccctcaccgccctggtagcctctcgcctccatggcgaccgcgagctcttccgcgcgtttaaaggcgctgacaaacagcgggacaagcagcggaacaaccgctttgattctgtctttcaccgggccgcttgtaaagtccgcacccctcgccatttgcgccttcatgattttatctgtctcttccatcaatgtcgggataaatcgcaatgatatcgacatcatcaaagcgagttcgtgtacgggcagcttcacctttttaaaaggattcaggagctgctccattccatccgttatttcaatcggcgttgttgtcagcgtcagcagcgtcgtcataaagataaggtaaacgaaacggagagagataaaaatcccctgtataagtccgccctcatacactttaaaccagccaagctgaaaaatgacagatccttcatgcgtcatgaaaatgtgtaataaaaaggtaaacgccacaatccagataatcggcttaagccccttcagcaaaaagctgaacggcacgcgagtcaaggcgatcaccccgaatgtaaacaaaccgagcaaagcgtacgtctgtacgttgtttgccaaaaaaacgatacatacaaaaagaaagatgctgacaagttttgttcgcgggtccaatcggtgaataagcgatgatccgggaacatactttccgataatcatgctgtccatcattggtccttttcctcctgaaagaaagccttaatttcactggcggcatcctgcagggtcagcatgggtttttcatacttgactccgagagccttctcaagccgtctctgaaacttcaccgattcaggaagatccagtcccatttcggccatctcttcaccttttacaaacaagtcacgcggactccccgtcgctttaatggttcctttgtgcatgacgatcatttcgtcagcatagcgggcggcgtcctccatgctgtgggtgacgagaacggtagtcaggtttccccgctgatgaagcgcatagaacatgtccataatgtcctggcgccctctcggatcaagaccggccgtcggttcatccaaaaccagcacttccggctccatcgcgagaacgccggcaatcgccactctgcgcatctggccgccgctgagctcaaatggtgaacgatccaaaatgtcttccggaaggcccacaagccccagcatttcttttgctttccgttcagcgtcttctttttttacaccaaaattcatcggcccgaatgcgatgtccttcagcacagtctcttcaaacagctgatgttcgggaaattggaaaacgattccgactttttttcgcaaagtcttaaggtctttattctttttaccggctgccagaatcgtgctcccgagttcaagctgtcctttagtcggtttcagcaacccgtttaaatgctgcaggagcgtcgatttgcccgaccctgtatgcccgatgacggcaacgtagctgccctcttttatcacggcattgatatcatacagagccagccgttcaaaaggtgtcttcatttgatagcggtgttctacatctttgattttaatgtccacagctcattcaccagcccttcctgagtcagatggtttttcgttaacgccagtccgctttctttcaaaagcaggctgagctggaatgagaaaggcaaatcaagaccgatgcgaaccaagtcttcgtttaatttaaaaatctcttcaggcgtgccctctgcatatttcctgccgccgttcatcacaatgatcctgtccgcccttgcggcttcttccaggtcatgtgttatcgaaatgacggtggccatgccctgatcttttaagcgtctgacagtatcaaggacttcttctctcccaatcgggtcaagcatggatgtcgcttcatccaaaatcataatatcaggacgcgcggcaataattcccgcgatcgccactctttgtttttgacctccggagagatggtgcggctcttgatcaagaaaatcctgcatattgacttgtgtgacagcccaatctactctctcaatcatttcttcgcgcggaacaccattgttttctaaaccaaaagccacatcatcgcgaacagtcgttccgacaaattggttatcgggattctgaaagaccatccctattttttttctcacatcccacacggtatcctcagtcagcttgatgccgccgacttcaatttctccggcctcaggcaaaatcagcccgttcagcgctctggccaaagtcgacttccctgaaccgttgtggcctacgatagcaagccattctccttcgtatacctccagactcacaccgtccagcgccggtctttctgcatctttgcggtagcggaatagaatgtcttttacggatataagctgtttttgatccacgggcgcctgacctcctctcagctatagctctgcttttctgtctcatgataaaaagttctgatatctaaaaaaagggcatagatccagttagaaactgtcccgcccttctttagatacacaaaaatatgtgattaaaccaattcgatgattgccattggtgcaccgtcaccacggcgaggaccaagcttcataatacgtgtgtatccgccttggcgctcctcgtaacgagttgcaatgtcagagaataatttttgaagtgcatcttggttattttcttcattagcaacctcgttgcgaatgtatgcagctgcttgacgacgagcatgcaagtcaccgcgcttaccaagagtgatcatcttttcaacaacagagcgaagttctttcgcacgtgtttcagttgtttcaattctttcgttgatgatcaaatctgttgtaagatcacgaagcatagctttacgctgtgaactcgtacgtcctagttttctgtatgacatgtgatgtcccctcctttaatggaatgctgtttctaaataaaaaacacacgaaaatcctagttcacatggaaactagatcaatcgtctttgcgaaggccgagtccaagttcttctagtttcgctttcacttcttcaagtgatttgcgtcccaggttgcgaactttcatcatatcttcttccgtcttgttcgcaagttcttgaaccgtgttaatgcccgcacgcttcaagcagttgtaagaacggacagaaaggtcaagttcctcaatcgtcatttcaagaactttttctttttgatcctcttctttttcaaccatgatttcagcatgctgagcttcgtcagttaaaccgacgaatatattaaggtgttcagttaaaatctttgaaccgagagcaattgcttccttcggtccagtgcttccgtcagtccaaacatcaagtgtaagtttgtcatagtttgcaacctggcctacacgagtgttttctacctgataagataaacgagaaactggcgtaaagattgaatcgatcggaatcacgccgattggctgatcgtctcttttgttcgaatcagcaggtgtatacccacgtcctctttgtgcagtaaggcgaactcggaaactcgcattctcaccaagagtcgcgatatgaagatccggattaaggatttcaacatcgctgtcgtgtgtaatatcagctgctgtgacagttccttcgccctgtacatcaatttcaagcgtcttctcttcatcagagtagattttcaatgcaagctttttaatgtgcaagattatcgttgtaacatcttccacaacgccttcgattgtcgagaattcgtgcagtacaccatctatctggatcgatgttacagcggcaccagggagtgaggataagaggatacgacgtaaggagttacccagagttgtaccatatccacgctcaagcggctctacgacaaacttaccaaatttggcatcgtcgctgatttcaaccgtttcgatttttggtttttcaatctcgatcattacttaaaaccctccttcaaaacgtcgaaacctcgaatagaatcatatgagattccatccgaaattccccattgtttagtcccgtatgtgctcaggcaacgagtcggtgcattcgtttcataaataactgtatcataacccattattgacagggacacaaaatctatacaaacaaattacacgcggcgacgttttggtggacggcatccattatgaggaacaggagttacgtctctgatagctgtaacttcaagtccggcagcttgtaaagcacggattgcagcttcacggccagaacctggtcctttaacagttacttcaagagttttaagtccgtgttcgattgaacctttagcagctgtttcagcagccatttgcgcagcaaaaggagtagatttacgagaacctctgaatcctagagctccggcacttgaccaagaaagagcattaccatgagtatcagtgatcgtaacgatcgtgttgttgaaagttgaacgaatatgagcgattcctgactcaatattctttttcacgcgacgtttacgcgtgttttgtttacgagcagcagccattgtttaggtacctcccttacttattttttcttgttagctacagtacgacgcggacctttacgagtacgcgcattgtttttagagttttgtccgcgaacaggcaaacctctgcgatggcggattccgcggtagcttccgatttcgatcagacgcttgatgttaagagaaacttcacggcgaaggtcaccttctactttcagtttgtcaataacatcacggattttaccaagttcttcttcagtaagatcacgcacacgagtatcttcagaaacaccagcctctttcaagacttgctgagccgttgtgcggccaattccgaagacatatgttaaagaaataacaacacgtttgtcacgtgggatatctacaccagcaatacgagccattctctgggcacctccttattaattatccttgtttttgtttatgctttggattttcacagatcaccattacttttccttttctgcgaataactttacatttctcgcagattggtttaactgatggtctcactttcatgtgtttccaacctccttcagtttccggagtgctttatttgtaacggtacgtaatcctgccacgagttaagtcatatggagataattctaccgtaactttgtctccaggtaaaatgcgaatgaagtgcatgcggattttaccagatacgtgagccaaaaccgtatggccattttcgagttcaactttgaacatcgcgtttggcagtgtttcgacaatcgtaccttccacttcaattacatcgtctttcgccattcaagtgttctcccttcttcaaatcagtaacttgctctctgacaaatttcaaaagagaaaatctcagttatccgtttgtcacacgccctgtttcgtttatactgttctgaacttccggagatacgcaatcataaagggtgaatgattgatattctttttctaaggagaatgaaatgtacgcttttctccgtctgctttagtacacgatgatgaatcttcattccgatgacagcagctagccggtttttcttccgaccaattgtaaacctacaatctgcccaggtgcggaatgaaaaacatatgtcatggaattcatttcatcatctagacttttgtcagtatatcaaaacccgtttccgtaatcgcaatcgtatgttcaaaatgagcacactttttcccatctaccgttacaaccgtccagttatcagccaatgttttcacatatcggctgccagcgttaaccatcggttctatagcgagaaccataccaggcttcagcctaggtcctttgtttggcggaccgtaatgaggaatttgcggatcctcatgcaagtcttgaccaacaccatgtccgacatactccctaacaactgaaaactgctcattttcgacatacgtttgtattgcgtgggaaatattcgacaaacgttcacctggttttgcttccttcaagcctttatataaagactcctctgttacttccagcagtcgtttatcatcatcactgatgtttcctaccggatatgtccaagcagagtcaccatgataaccatttaatttagcaccgatatcaatgctgataatgtcaccgtcacgcaaaacccttttaccgggtattccgtgaacgagttcttcattaactgatacacagatgctcccgcgaaacccattataccccttaaaagatgggattgcaccctgcttctcaataaaacgttcggcaatttgatccaattcttttgtcgagattcctggtttaatgtgctttttcatctcttcatgagtcaaagccacgattcgccctgcttcccgcatgatgccaagctcacgaggggtcttacagataatcatttgctcaatcctccaagaagctctttcacatctttgtacacgtcgttaatgtcctgctggccattgacgttgacaagataccctttctcagaataaaaatcgagtaaaggctgagtctgcttcatgttgacctcaagccgttttgagacggtttcctcattatcatctgcccgttgataaaggtctcctccgtctttatcacaaacacccggcgttttcggcggattgaaaaccaaatgataggttgtgccgcaaacactgcaaattctgcgtccagtcaaacgttccattaaagagtctttgtctactttaatgttaatgacataatcaatcggcttgccgtattcctcaagaatgttttcaagagcttcagcctgagcgactgttcgcggaaatccgtccagaagaaaacctctttcacaatcatctttgccgagtctttctttgacaatgccgattgtgacttcgtccggtacgagctcgcctttatcaatataagactttgcttcgagtccgagtggtgtttcttctttcatagcagcacggaacatatctcccgttgagatatgaggtatcccataatcctcaacaattcgttctccctgtgtgcctttaccggctccaggaagtcccattaagactaagttcattcggatttcccccgtcctctcttatttagaggaatggttaaaaccagtcctctaatttttcataaatcctcggtaattacgtttcactaactggctctccagctgcttcattgtctccaaggctaccccgacgacaattaacaatgatgttccgccaatctgtgcactttgaggcaatccagcgaattgaatgaaaaagataggaagaatggaaatcacggctaagaatatagaacccacaaacgtaagtcgatacaaaatgctcgtaattctatcttgagtcattttccctggacgaacccccgggatatagccaccctgtttttttaggttatcagccatttgttcagggtttacctgcacaaaagcatagaagtacgtaaaggcgataattaatgcgacataaaccgccatgcccaccggatgtgtattgtcaaagttggcttgaatccactttgtcacattgttttctccgaaaaatgacgcgatagtacgcggcgtaataagaaacgcaaccgcaaagattaccggaataacccctgccggattcactttaagcggaaggtgagttgactggcctccgccaacaggtgaacgaccttgcccttttgcatattgaatcgcgattttgcgtacggcctgctgaatgaaaataacaccaacaataacggccaaaatcgcaatcaccagtaaagcgatttttacaatatgaataaacagctgatcgctgctgccgacaaattgagtctcataaatctgcccaacagttttcggaatactagccacaatccccgcgaagatgatgatcgaaattccgttacctactccattggaagtaatttgttctcccagccacattaaaaaagcagttcctccagtgagtactaaagcaataatcagatatgtcgatatgccggatttttcaatcagcataccgtttgccaggttgttaaacccgtaagacatacctaatgcctggataaaaccaagcacaatcgtaaaatatctcgtgaactgagctaatttacggcggccgacttcaccttgcttagaccactcggtaaacttcggcacaacatccatctgaagcagctgaatgatgattgaagcagtgatgtaaggcgtaattcccatcgcaaaaatggagaactgataaagcgcaccgccgccaaatgtattaaggagatcaaaaacccccatcgaactttgtgtctgcaacgcctgagcatttacatatggcacagggataaatgcacctatgcgaaagacgataagcatgagtaatgtaaaaatgattttattccgaatatcactcacacgcataaagttggagattgtcttaaacaagttagatcacctcagctgtaccgccagcagcttcaacagcttctttcgcagaagcagagaatttattggcttttacagttaattttttctctaatttaccgttgccaagaatctttactcctgcattaagtttgctaataacaccagtctcaagaagaagttcaggagtgacttccgttccttccgcaaaaccgttcaatttgtctacgttcacaatagcgtaatccttacggttgatgtttgtaaaaccgcgtttaggaagacgttggaataaaggcatttgtcccccctcgaatccagggcgtacaccgccgccagaacgagcgttttgacctttgtgacctttaccagctgttttaccgttaccagaaccaataccacgacctacgcgattgcgtactttacgtgaaccttctgaaggctttaattcatgaagtttcattaggacacctccttagcctataatttatttttattgttctttaacagaaactagatgagatactttattaatcataccgcggatcgcagcgttatcttcatgaacgacagtttggtttgttttctttaaaccaagtgttcttacagtaacgcgctgatcttccgggcgaccgattacactgcgtttgagggtaatttctaatttagccattaatgttccctccttatcctaacagttcttctacagattttccacgaagcttcgcaacctcttcagcacgtttaagctcacttaaaccttgaagtgttgcacggatcatgttgatcggtgtgttagaacctaaagacttagaaaggatatcagcaacgccagcaagctcaagtaccgcacgtacagggcctccagcgataactccagtaccttcagaagcaggtttcaacaagatattgcctgcaccgaaacgtccgatgatttcgtgtggaatcgtagttccaaccattggtacttcaatcaaattctttttcgcatcttcaacagctttgcggattgcttcaggtacttcttgtgctttaccagtaccgaaacctacgtgaccgtttttgtcaccgacaacgactagagctgcgaaacggaaacgacgaccacctttaacaactttcgctacgcggttaaccgtaactaagcgttcttctaactctaatttgcttgggtcaatacgacgcataatcatgtgtccctcctttttttattaaaatttcagtccggcttcacgagctgcatcggccagagcttttacacgtccatggtataagtatccgccgcggtcaaatactacgtcagaaacacctttctcagaagcgcgtttcgcaacgagttcaccgactttagcagcagcagcgctgtcaccagtgctttccacgttcaaatctttatcgagagtagaggcactagcaagtgtaacgccatttacatcatcgatgatttgagcataaatgtgtttgtttgaacggaacacattcagacgaggtctttcagctgtgcctgaaagtttagcacgaacacgggcatgtcttttttgacgagcagcatttttgctagttttcgtaatcatccttaggtcactcctttcttcactttaagcggtcttacttagcagatttaccctctttacggcgaacaacttcaccttcgtagcggattcctttacctttgtaaggctctggagaacgtacagcgcggatgttagcagcgatagctcctacacgctctttgtctgtaccttttacaactactttagtttgagaaggaacttcgatttcgatgccctcttcaggaacgatctcaacagggtgagagtatccaacgtttaaaacaagtttgtttccggatttagccgcacgataaccgacaccgactaattccaaacctctttcaaatcctttagatacgccttcaaccatgtttccaagcagactgcgagtcgtaccatgcagcgcacggtgctctttgtgatcagaaggacgagtaactgtaagcacgttgtcctcaattttgatttccatatcaggatggaaagtacgagttaattctccttttggtccttttacagctacagtgttgccttcgttcagcgttactgtaactccagaagggatctcaagcagttttttacctacacgagacatactaaaacacctccattcttgttaaacttcttaccaaacgtatgctagaacttctccaccagcttgttttgcacgggcttctttgtccgttaaaacaccttgtgatgtagaaataatcgcgattccaagaccgttaagtacgcgaggtacttcatttgatttagcgtatacacgcaaacctggtttgctgattcttttaagaccagtgataacgcgctcgttgttttgtccgtatttcaagaaaacgcggatgataccttgtttgctgtcttctacgaactcaacgtcacgaatgaaaccttcacgctttaaaatgtcagcaatttctcttttcaatttagaagcaggaatttcaagcttctcatgacgtaccatgtttgcattgcgaatacgagtcagcatatctgcaattggatctgtcataaccattatataattacctccttcccattcttggggattaccagctggcttttttcacgccaggaatttgtcctttatatgcaagctcacggaaacaaatacggcaaagtttaaatttacgaatgactgagtgcggacgtccgcagcgttcacagcgagtgtactcttgcactttaaactttggtgtacgttgttgtttcgcaatcattgactttttagccacgatttcgcctccctttcattgattatttctggaacggcatacctacttgagttaatagctcacgagcctcttcgtcagagttagcagtcgttacgataacgatgtccattccgcgaacctttgttactttatcgtagtcaatttcagggaagattaactgttctttgataccaagagtgtagtttccgcgaccgtcgaaagatttcttagaaatcccgcggaagtcacgtacacgcggtaaagatacagaaataagtttatcaaggaaatcatacatgcgctctccgcgaagagttactttcgcaccgataggcattccctcacgaagacggaatccagcaattgatttcttcgcacgagtaacgacaggtttttgacctgcgataaacgttaattcttcaacagcactgtcgattgcttttgcgttttgaacagcatcaccgacacccatgttgattacgattttttcgatttttggcacctgcataacagagtcgtagttgaacttcgtcattaaagcaggtgaaatttctttattgtacttttctttaaggcggttcatgagatagacctcccttcctttaaatactatttatctaagacttgcccagatttttttgcaacacgaacttttttgccatcttccactttgtatcctacgcgagtcacttcacctgttttaggatcgagcggcataacgtttgatacatgaattggcgcctcttgattagaaataccgccttgagggtttgcttgagttggtttagagtgcttcttcaccatgtttacgccctcaactagaacgcggtcctttttagggaaagcagcaaggatcgtaccttgtttgcctttatctttaccagagataaccattactttatcgccttttttcacatgcatcctgatcgcacctccttgagtaaggcatttatttcattagataacttctggagccagagaaacaattttcatgaagttgttttcacgtaattcacgggcaaccggtccgaagatacgagttccacgcgggctcttgtcgtcacggatgataacacatgcattctcatcgaagctgatgtatgatccgtcagttctgcgtgctccgctttttgtgcgaacgataacagctcttacgacttcaccttttttgacaacgcctcctggtgttgcttgtttaaccgtgcaaacaattacatcaccaatgttagccgttttacgtccagaaccgccaagaactttaatagtaagtacctcacgcgcaccggagttgtcagcaacttttaaacgagtctcttgttgaatcattatttgttacctcccttcggaaaaagaattccgaactttattagataataacagcttcttcgacaacttctactagacgaaaacgcttagttgcagataatggacgagtttccatgatctttacgatgtctccgattttagcttggttattttcatcatgtgctttgaatttctttgagtattttacgcgtttaccgtaaataggatcctttttgtatgtttcaacaacaacagtgatggttttatccattttgtcagaaacaacacggccttggtaaactttgcgttggttacgttcgctcatgctcacgacctcccctcagtgattatttgttggcagcaatttctctttcacgaatcacagttttcatgcgcgcgatagctttgcgcacttcacgaatgcgagcagtattttcaagttgtcctgtcgctaattgaaagcgaagattgaaaagttcttctttaagagactttactttttgttcaatttcagcagtggtaaggtcacgaatttcattagctttcatttgattcaccaccaatttcttcacgttttacgaacttcgttttaattggcaatttgtgagatgcaagacgaagagcttcacgagctacctcttcagacacaccagaaatttcaaataaaactttgcccggttttacaacagctacccagccttcaggagcccctttaccggaacccatccgtacctcaagcggtttagcagtgtaaggttttgaagggaaaattttaatccaaactttaccgccacgtttcatgtaacgagtcatcgcaatacgtgcagcttcgatttggcggtttgtgatccaagaagcttcaagagcctggataccgtactcaccaaaatgtacttcagtaccgcctttagcgcgaccgcgcatttttccgcgatgctctctgcgatatttaacgcgttttggtaataacatattattttcctccttcctcagttttcttcttagtaggaagaacctctccacgatagatccagacttttacaccaagcttaccgtaagttgtgtcagcttcagatgttgcatagtcgatgtcagcacgtaaagtgtgcaatggaacagttccttcactgtagtattcagaacgagcaatgtcagctccgccaagacggccggaaaccattgttttcacaccttgtgctccagcacgcatagtgcgttggatttgttgtttctgcgcacggcggaaagaaatacggttttctagttgacgagcgatgttgtcagctacaagctgagcatcaagatctgctcttttgatttcaagaatgttaatgtgtacacgcttgccagtaaggctgttaagggctttacgaagtgcttcaacttcagatccgcctttaccgattaccataccaggcttagcagtgtggatcgtaatgttaacgcggtttgctgcgcgctcgatttctactttagaaacagaagcgtcagaaaggcgtttgctaatgaattcacgaatttttaaatcttcgtgcaggaagtcagcgtaatctttaccagcgtaccacttagattcccaatcacgaatgactccgatacgaagaccgactggatttaccttttgacccactacttatccctccttcttttctgatacaacgattgtaatgtggctcgtacgtttgttgatttggctcgcacgtcccatagcacgcgggcggaatctttttaacgttgggccttcgtcaacaaatgcctgagaaataaccagattgttagcgtccatctcgtagttgtgctcagcatttgcgatagcagattttaaaactttttcgatgatcggagaagcagctctcggagttaagttcaggatagatactgcttcgcctacttgcttacctcgaatcaggtccattactagacgtgctttacgaggagcaatacggactgttcttgcaacagctttagcttgcatttaaaagcctcctctcttagcgtcttgtttttttatcgtcactggcgtggcctttgtaagtacgagtcggtgcgaattcgcccaacttgtggcctaccatgtcttcagaaatgaatacaggcacgtgtttacgtccgtcatatactgcgatagtgtgaccgataaattgtgggaaaatagttgaacggcgagaccaagtttttacaacttgtttcttgtccgtttcatttaatttctcgatttttgtcatcaagtgtccatcgacaaatggtccttttttcaagctgcgagccattttggaacctcccttcgtgattgcactacggtccgaaatgaaccgtagacaaccccgttatttatttttacgacgacgtacgataaatttatcagatttgttctttttcttacgtgtcttgaatccaagagtcggtttgccccaaggagacattggtgatttacgtccgattggcgcgcgaccttcaccaccaccgtgcgggtgatcgttagggttcattacagaaccgcggactgtagggcggatgcctttccagcgagagcgtcctgctttaccaacgttgataagttcgtgctgctcgttacctacttgaccgatagaagcgcggcaagcagaaaggatcatgcgaacttcaccagagttaagacgtacaagaacgtatttgccttctttaccaagaacctgagcagatgtaccagctgaacgtacaagctgtccgcctttaccaggttttaattcaatgttatgcacaactgtaccaacagggatgttgataagcggaagtgcgttacctactttgatgtcagcttcagggccggacatgatttcagtacctacttgaattccttttggtgcaagaatgtaacgtttttctccgtctacatagttgattagtgcaatgttagctgaacggtttggatcgtactcaactgtagcaacgcgtccaggtataccatctttatcgcgtttgaagtcgataacacggtattggcgtttgtgtccgccaccttggtgacgtacagtcaatttaccttggttgttacgtccgccttttttgtgaaggggcgcaagcaaggatttttccggctggtcagtcgtgatttcagcaaaatctgaagttgtcatgccacgacgtccgttagaggtcggtttatactttttaatcgccattttgaatttccctccttctttttacagataattaagcttcaaaaatttcgatttctttgctgtctgcagtaagttttacgatcgcttttctgcgacggctagtcataccagtgtagcggccgacacgttttgatttccctttgtagttcatgatgttgactttgtcaactttcactccaaagatactttcaactgcatctttcacttctgttttgttagctcttacatcaacttcaaaagtatattttttttcagtcattaaatcagcagaacgttcagtaatgacggggcgcttaagaacatcacgaggatctttcattatgcaagcacctcctctactttttcaaccgcagcttttgtaatcagaagcttctcgtggttgacaacgtctaacacgttgattccgttagcttgaacaactgtaactccagggatgttgcgtgcagaaagagatactgcttcgtttgcatccgcagttacgattaaagcttttttctcaacagataatcctttaaggatagctgccatttcttttgttttaaccgtatcaagagtaagatcttcaagaacaataatgttgttgtcgttcactttagaagacaatactgatttgattgccaagcggcgaacttttttaggtaatttgtaagaatagctgcgtggtgttgggccgaatacgacaccacctccgcgccattgcggtgaacggattgaaccttgacgggcacgacctgtacctttttgacgccatggtttgcgacctccgccgcgtacttcagaacgattttttactttgtgagatccttgacgtaaggaagctctttgcataagaatagcgtcgaatactacgctctcatttggctcaattccaaatacagacgcgtttaattcgatatcaccagcagtagaaccgttttggttgtataatgctacttttggcatgatcaatttcctcctttcctaagagacttatttagatttaacagcacttttaacagtgattaaagtttttctcgcaccaggtacgttacctttaatcaaaagaagattgcgctcagcatctacttttacgatttcaaggttttggacagtgatttgatctccgcccatgcgtccaggtaatagtttacctttgaatacacggttaggatctacaggtcccattgaaccaggacgacggtggtagcgtgaaccgtgagacataggtccgcgagattgtccgtggcgcttgattgcaccttggaaacctttacctttagatactcctgttacatctacgatttctcctgcagagaaaatttcaaccttgacttcctgaccaatttcatacgcatccatatccacgccgcgtaattctttaacgaagcgcttaggagcagtttccgcttttgcaacgtgtcctttttccggtttgtttgaaagcttttcacgcttatcgtcaaaaccaagctggatcgcttcatagccatcattttcagctgttttcttttgaagaacaacgtttggagctgcttcaataacagttaccgggataagatcaccgttctctgcgaatacttgcgtcataccaatttttcttcctaagattcctttggtcattcgtcacacctcctattaagatcattctatattttagaattaaagtttgatttcgatatcgacaccagatggtaagtctaatcgcatgagagcatcaacagtttgtggtgttgggttcacaatgtcgattaaacgtttatgtgtacgcatttcaaattgctcacgagaatctttgtatttgtgcaccgcacgaaggattgtgtaaactgatttttcagttggcaacggaatcggaccagatacgctggcaccagaacgttttgccgtttcaacaatcttctctgcagattgatcaaggattctatgatcatatgcttttaaacgaatacgaattttttgttttgccattattttccctccttttcgcctacatcacgttagacagttctccgtgagaaaaacctgatcaccttgccatggcaaagcggccgggtgtgtcagcaacctctcacttcatcgcagtcaaagaccaacatacactattatacagaaaatagacgcatgttgcaaggtttatttaaagaaccttgtggttttcacactttgattattatacaggtgataccatgattaatcaaggatatgcctgttttctttcagagatggaacgatgcgaaccggctgacaacttcggcaaagcgatccggttcctccaagtgaggcgaatgggctgagttctcaaaccaatgccattctttatacggcgcatcaaccttctgataatattcataagacgtcgtccccgggaccgtcaaatcgtatctccctgacataaaacagcacggtattataatagaagaaactgattctccggcatcaaagaaaatgagatcctcccacaggtgtttcaggctgaacatttgcccccgcgcggctaagaaactccctctcacaccgtacggttcaccaaacagcattcgcccccctgctttaagagcaccgatcggatgatgggtaaagccccctcccctcatctcgatacaaagcagaaacaacgttcgctgcagctgtttctcccatggaggcgctccgataaagctcagcgtcttttccagcaggaaatgtttgcgttgcctgctccattccatcatcagccggtaagcttccgtttcttccttttgaatattaaccacctgactgataccgatatacccataatacaaatcaggtctctcttgaagaacatgaagcgccagaactgaaccccacgaatagccggcgatatatattttttgcctgctgaattgcttgcataggcgttcggtcaaatgaatggtatcggctgtcagctgatccaaggtcatagatgaacccggaatttcctttgaataagagagacccgcccctctctgatcccagttcacaacggtgaaatgcttttccagcttattctggtattttctcgcatagccgatttggggcgtgccgggaccgccgtgcaaaaacaaaagcagcggattactcctgtcatcaccattaatcataatggtttgttcactgccattaatcagcaattgctgaagcattgaaatacgattggttttcttgaagttatcgttcatcgctctgctcctaaaatttgtatacgttctattatacatggaatcagcggggaaacaaaaaaacgaggccccataagggaccccgcattaatgaacgagtcgattactcagtgattgtagaaacaacgcctgaaccaactgtacgtccgccttcacgaatagagaaacgagttccttcttcgatagcgattgtagagataagttcaacgatcatttcagtgttatctccaggcataaccatttctacgccttctggaagattgatgataccagttacgtcagttgtacggaagtagaactgaggacggtagttagagaagaatggagtatgacgtccaccctcttctttagaaagaacgtaaacttcagctttgaatttgctgtgtggagtgattgtacctggtttagcaagtacttgtccacgttggatgtcttcacgagctacaccgcgaagaagtgcaccgatattgtctccagcttcagcatagtcaagaagcttacggaacatttcaacacctgtaacagttgttttgctgttttcttcttgaagaccgatgatttcaacttcgtcaccgactttaacttgtccgcgttctacacggccagtagcaactgtaccacgaccagtgattgagaatacgtcctcaactggcatcatgaatggtttgtcagtgtcgcgttctggagttgggatgtactcgtcaactgcagccataagttcaagaattttttcttcgtactcagcgtcaccttcaagagctttaagagcagaacctttaacaactggtacatcatcaccagggaagtcgtattcgctaagaagatcgcgaacttccatttcaacaagctcaagaagctcttcgtcgtctaccatgtcgcatttgttaaggaatactacgatgtatggtacaccaacgtttttagaaagaaggatgtgctcacgagtttgtggcattgggccatcagcagcagatactacaaggatagctccgtccatttgcgcagcaccagtgatcatgtttttaacatagtcagcgtgtcctgggcagtcaacgtgtgcatagtgacgagtgtcagtttcgtactcaacgtgtgcagtagagattgtgataccgcgctcacgttcttctggagcaccatcaatttgatcgtacgccatagctgtacctttaccagatttcttatgaagtactgttgagatagcagcagttaatgttgttttaccatggtcaacgtgtccaattgtaccgatattggcatgtgatttggaacggtcgaatttttctttagccattctaaaatcctccttaagagcttttaattagtaatgtatagagtgatagaaagtgaaagcaagctctcacttcctcatcttacaatagtagttatacttgagttaagtggcaaaatcaattattcgcctttattttttttgataatttcttcagcgatgctcttcggcacttcttcgtagtgatccatgaacattgtgaacgtaccgcgtccttgcgtgttagaacgaagggcagtagcgtaaccgaacatttcagcaagaggtaccatcgcacgcacaacttgagcgttaccgcgagcttccataccttctacgcgtccgcgacgagaagtaacatcacccatgatgtctcccatgtattcttcaggaataacaacttcaactttcatgattggttcaagaagaactgggttacatttgctgactgcatttttcaatgccatagaagcagcgactttaaacgccatttcgtttgagtcaacatcatggtaagatccatcaaaaagtttcgccttgatgtcgattagcgggaatccggctaggacaccattttcaagagagtcttcaagacctgcttgtacggctgggatgtattcacgaggaacaacaccaccgacgattgcgttttcgaattcaaagccagcgccttcttcgttcggttcaaattcgatccaaacgtgaccgaactgaccgcgtccgcctgattgacgtacgaatttaccttcaacttttgcaccggtacggaatgtctcacggtacgcaacttgaggagcaccaacgttagcttcaactttgaactcacgcttcatacgatcaacaatgatatcaaggtgaagctcacccataccagagatgattgtttgacccgtttcagggtttgtttgtgtacggaatgtaggatcttcttcagcaagtttcgctaaagcgatacccattttatcttggtcagcttttgatttaggctcaatcgctacgtcgataacaggctctgggaattccattgattcaaggattacaagatccttctcatcacatagagtatctccagtagaagtatcttttagacctacagcagctgcgatgtctccagcgtaaacagtagagatctcttcacggctgttagcgtgcatttgaaggatacgtcctacgcgctcacgcttgccttttgtagagttctttacatatgaaccggaatcaagtgtaccggaatatacgcggaagaatgtcagcttaccgacataagggtcagtcataactttaaatgcaagtgcagagaagggctcttcatcagaagaatgacgaacgatctcttcatctgtgtcaggacgtacacctttgattgcagcaacatcagttggcgcaggaaggtagtcaagaacagcatcaagtacaagctgaacacctttgtttttgaaagcagatccaacaagtacagggtagaattcaacattcagtgtacctttacggatagcagctttcagttcagggatagtgatttcttcaccttcaaggtacttttccataagctcttcatcaagctcagctacagcttcaatcaggctgctgcgaagctcttcagcttgctctttgtactcttcagggatttctttcgcatctgaacgagttccaaggtcatcttcgtagaaatacgcaacgttttctactaagtcaatgataccttcgaagttgtcttcagcgccgatcggcaattgaattgcgtgagcgttagcttgaagacggtctcttaaagtgcctacagagtaaaggaagtctgcgccgattttgtccattttgttgacaaatacaacgcgcggtactccgtaagttgttgcttgacgccatactgtttctgtctgaggctcaacacctgattgagcatcaagtacggcaaccgcaccatcaagtacacggagtgaacgttcaacttcaactgtgaagtctacgtgtcccggtgtatcgatgatgtttacacggtaacctttccactgtgcagtcgttgctgcagaagtgattgtgataccgcgttcttgttcctgctccatccagtccatttgcgaagcaccttcgtgagtttcgccaattttgtggatacggcctgtgtagaacaagatccgttctgtagtagtcgttttaccggcatcgatgtgagccatgatcccgatattacgagttttttctaaggagaactctcttgccattgggtaatttctccttccttattagggaattattattttgattatatgaatcctaccagcggtagtgagcaaatgctttgttcgcttctgccatcttgtgagtgtcttcacgtttcttaacggcagcaccagtgttgttagctgcatcaagaatttcgttagccaggcgctcttccattgttttttctccgcgaagacgcgcatagttaaccaaccagcgaagaccaagagttgtacggcgttcaggacgaacttctacaggcacttggtagttagctccacctacacggcgtgcttttacttcaagtacaggcatgatgtttttcaatgcttgttcgaaaacctccattgcatcattgccagtgcgttctttaatgatatcgaatgacttgtataggattgtttgagatttaccttttttaccgtcgatcatcattttgttgatcaggcgggataccagcttagagttgtaaagcggatcaggtaaaacatctctttttgctacaggacctttacgtggcatctgaatatcctcccttcatagttttaatgatttatttgattactttgctttaggacgtttcgtaccgtatttagaacggccttgcgcacggttttcaactccggcagtatcaagcgcgccacgaacgatgtggtagcgtacccccggtaagtcttttacacgtccgccgcggatcagtacaacgctgtgctcttgcaggttgtgaccgataccaggaatgtaggcagtaacctcgattccgttagtcaaacgaacacgagcatatttacgaagtgctgagttcggttttttcggtgtcattgtacccacacgagtacataccccgcgtttttgtggagaagatacgttagtgtgctcttttttaaagctgttgtatcctttgtttagtgcaggtgacttagagttttcaactttgctcacgcgtcccttgcgaattagctgattaattgtaggcatgttgtgttcctcccttcattacgttttataacccacatacccaggtggttcatcattaggcaaaaaacaatgtctttacacaagattgatatcttatataaaaacaaaaagtacgctataacataatggcaacagctgctgctcccacttcaattccgcaggctttgccgagctttttcatggaatccaccatacagacagcggtattttggttctttgcaagctggataacgccagctgtaagaactgaatccgcgtcttttgccacgacgacttccttcactgaacctcgttttagagctttcactgtttgcttcgtaccaataataattgatttggcctgtgatactttatcataagacataaacatatcctccaaagtaacaggttttatttcgagcaccttggttatattatcactctgcgggacggatgtcaacaacgtatgacattttttagtgcagtccaccgccagaataattgtaatactgaggaaaagctgtcgaaacagcctttcctgcagcagtttctattattcagccggaaccatatcttccgaaggctgaacgtttgaaacaggttttacttttctgtaattcatcataccggtaccggccggaaccagcttaccgatgataacattctctttcaggccgagaagttcatcgcgcttgcctttaatcgcagcatctgtaagaacgcgtgttgtttcttggaatgatgcggcagacaagaatgaatccgtctcgagtgaagcttttgtgataccgagaaggacaggacggcctgtagcaggtcgattgccttcaagcagcacttttttgttcgcttctgtgaattggtgaatatcaagcaatgtgccagggagaacatcagtatctccggcatcgatcacacggactttgcgaagcatctggcgaaccattacttctacgtgtttatcgccgatttcaaccccctgcatacggtaaaccttctgaacctcatgcagaagatattcctgaaccgttgtcaggtcagtgactttaagaagttctttcggatcgattgaaccttctgtcagcacttgaccgcgggtaatctgatcaccctcagccactttcaggcgtgagttgtaaggtgccgtgtatgaacgtgtctcaacagcgccctgaacaacaatctcctgctgtttgtcgcggacttcattgatttcggcaattgtaccgtcaatctcagaaatcgtcgcttgacctttcggattacgcgcttcgaaaagctcttggatacgcggaagaccttgtgtgatatcgtctccggcaaccccgcctgtgtggaacgtacgcattgttaactgtgttccaggctcaccgatagattgagcggcgataatacctactgcttcgccgacttcaacatcagttccggttgcaaggttacgtccgtagcatcgtttacatacaccatgaggagtgttacatgtgaacgcagaacggatccacacttcttcgattccggcttcaacgatttccagtgctttatcttcatcgatcaattcattttcgttaatgagcacagcacccgtttcaggatgtttgatctgttttctggcgaaacgtccgatcagacgctcttccagacgctcgatgatttccgtgccttctttgagcggttttgcaagaataccgcggtctgttccgcaatcagtttcacgaatgataacatcctgcgcaacatcaacaagacggcgtgtaaggtaacctgagtcagctgttttcagggcggtatcggcaagacctttacgcgcaccgtgagtggagataaagtactccaatactgtcagaccttcacggaaacttgatttaatcggcaattcaatgattcgtccagccgggttggccatcagaccgcgcatacccgcaagctgtgtaaagttagatgcgttaccacgggctcctgagtcactcatcatgtagattgggttgacttcgtctaatgatttcatcagtttgccttggataacatctttcgctgaactccaaattgaaatgactctttcataacgttcttcttcggtgattaaaccgcgtctgaactgtttcaggacattatcaactttgctttgtgcttcttcaaggatttcctgtttgtcatcgagaacgacgatatcagaaacccctactgtgatgccggctttcgttgaatatctgaaaccgaggtttttcatgcggtcaagcattttagacgtttccgtgatatggaatcgtttaaagatttccgcgatgattttaccgagaataccttttttaaacggtgcgttgatcggctgctcagcaatcacagcttttacgtcagcacctttatctaagaagaaacggtcaggtgtcttctcttcaatgttgctcttcgttggttcattcatgtaagggaatgattccggaagaatttcattgaagacgagcttaccgacagttgtaattaacaattttgaacgctgttcttcagtaaatgtcacattcttaagggagttcgctgcaacagcaactctcgtatgaaggtgaacataaccgttttgataagcaagaagcgcttcgtccgtatttttgaaaaccataccctcgccgactgctccggcgcgctcaagcgtcaggtagtagtttcctaataccatatcctgagacggcgtaacaaccggtttaccatctttagggttcaagatgttttgggccgcaagcatcagaatgcgcgcctcagcttgagcctcagctgataaaggtacgtgaaccgccatttggtcaccgtcaaagtcagcgttataagctgtacatactaacgggtgaagacggatggcgcgtccttcaacaagcgtcggttcgaaagcctggatacctaatctgtgaagagtaggggcacggttcagtaagaccggatgctccttaatgacagattcaagtacatcccatacttcaggctgcacgcgttcgattttgcgttttgcgctcttgatattgtgagcaaggcctttttcaacaagctctttcatgacgaaaggcttgaagagctcaagcgccatttccttcggcaaaccgcactgatacattttcagatgcggacctacgacgataacggaacgtcctgagtagtctacacgtttaccgagaaggttctgacggaaacgcccttgtttccctttcagcatgtgagaaagagatttaagcggacggttacccggtccggtaaccggacggccgcggcgtccgttgtcaatcagagcatcgactgcttcctgaagcatacgtttttcgttctgaacgatgatgcttggcgcgccgaggtctaacagacgttttaaacggttattacggttgatgacacgacggtaaaggtcgttcaggtcagacgttgcgaaacgtccgccgtcaagctgaaccatcggtcttaattcaggcggaataaccggaagcacgtcgaggatcatccaagacggcttgtttcctgaattacggaaggcttcaagcacttcaaggcgtttgatcgcacgtgtacggcgctgtccttgagaagtcttcagctcttcttttaacatatcaacttctttgacaaggtcgatgtcctgcagaagtttattaatggcttccgcacccatagaggcttggaatttgtttccgtacttatccagatacgcacggtattccttttcagataaaagctgtttcttttcgagcggtgtattggccgggtcagttacgacgtaagaagcaaagtaaataacttcttccagcgcacgcggtgacatatccaatacaagacccatacggctcggaatacctttgaaataccaaatgtgagaaaccggggcagccagttcaatatgccccattctctcacgacggactttagcccgcgttacttcaactccgcaacggtcacaaactacgcctttataacgaacccgcttgtacttgccgcaatgacattcccagtccttagtcggtccgaaaatgcgttcgcagaacaggccgtccttttcaggtttcaatgtacgatagtttatcgtttcaggctttttcacttcaccaaaagaccatgaacggattttatccggtgaagcaagaccgatgttcatatactcaaaattgttcacatctagcaaggggcctacctccctttttatcttcggattaaccgatgtcacttgcctttatcaatcagagactactctttcgttactgcgtcacgttcaacgtctggagatgctgtttcttccggcgcttcatcacctgataatgcaaggccgtcagcttgtttcgcatcttcctcgtcttctagatctctcatttctatttcttcttcatcgcctgaaaggattttcacgtccatacctaagctttgaagctctttgatcaatactttgaatgattccggaacaccaggctctggaacattgtcgcctttgacgatggcttcatatgttttcacacgtccgaccacgtcatcggacttcacagtcaggatttcttgaagcgtgtaagctgcgccgtaagcttcaagcgcccaaacctccatctcaccgaaacgctgtccgccgaattgggctttaccgccgagaggctgctgcgtaacaagtgagtaaggacctgtagaacgggcatgaagtttatcatcaaccatgtgtgccagtttgatcatgtacatgattccgacagatacacggttgtcaaacggttctcccgtacggccgtcataaagaactgttttagcgtctcttgacatgcctgcttcttcaagtgtttcccacacatcttcttcacgcgcgccgtcaaatacaggtgacgcgatgtgaatgccgaggtagcgggcagccatacccatgtgaagttctaatacctgaccgatattcatacgtgatggtacacccagcgggttaagcatgatatcgatcggcgtgccgtcaggaaggtaaggcatatcttcttcaggaagaatcttcgagataacccctttgtttccgtgacgtccggccattttatcaccttcagaaatcttacgtttctgaacgatatatacgcgtacaagctggttcactcccggaggaagttcgtcgccgtcttcacggttgaagacttttacgtcgtggataattccgccgccgccgtgaggcacacggagagaagtatcacggacttcacgcgctttttctccaaagatcgcatgcagaaggcgttcttcagccgtaagctcagttacacctttaggcgttactttacctacgagaaggtctccgtcgttgacttccgcaccgatacggataattccgcggtcatcaagattgcgaagcgcgtcttcccctacgtttggaatatcacgggtgatctcttccggcccaagctttgtatcacgtgcttctgattcatattcttcaatgtgaatagatgtgtatacatcatctttcacaaggcgttcactcatgatgatggcatcctcatagttgtaaccatcccatgtcatgaagccgaccattacgttgcggccgagagcaagttcaccaagctccattgaaggtccgtcagcaaggatttctcctttgactacttcatcgccgacactgacgatcggacgctggttgtagcacgtaccttggttggagcggacaaatttcagcaagctgtacttatccaggttgccttttactttttggccgtcaatttcttcatagcggcgcacccatacgtttttcgcttccacccgttcaacgataccagggtgtttacaaataacggctgcaccggagtctttaccggatacgtattccatacccgttccgacgatcggagcttccggctgcatcaaaggcacagcctgacgctgcatgttcgctcccatgagggcgcggttcgagtcatcgttttccaagaacggaatacatgctgtcgcagcagatacaacctgtttaggagatacgtccatgtaatccacgcggttgcgggctacaacggtgttttcccctctgaaacgcgctacgatgctgtcatccaagaaagaaccgtcatcgctcagcttagcattcgcttgggctacgacatagttatcctcttcatcagcagtcaggtagtcgattctaggcgttacttttcctgtttcaggatcaacgcggcggtatggcgtctcaatgaaaccaaagcggtttactttcgcaaatgatgacaatgagttgatcaaaccgatgttcgggccctcaggcgtttcaatcggacacatacggccatagtgagagtagtgaacgtcacgtacttccatacctgcgcgctcacgtgtcaaaccgcccggtccgagagctgacagacggcgtttgtgcgtcaattcagcaagcgggttcgtctgatccatgaattgagaaagctgtgagcttccgaagaactctttaatagacgcaataacaggtctgatgttaatcagctgctgcggcgtaattgtattcgtgtcttgaatagacattctttcacgtacgacacgttccatccggcttaaaccgatacggaattggttttgcaggagctcacctacagaacgcagacggcggtttccgagatggtcgatatcatcagtgtcgcccactccgtgcaggaggttgaagaagtagctgatagaagaaataatatcagcaggcgtaatgtttttaatcgcctcttcgatgtaagcattgccgatcacattgatcgtctgctctccttctgcatcggtaggagcatagattttaatggattgaagcatcacttcatcctcgacaacgccgccgttaggataaagctttctgaagccgattccattttctaagtatggcagtactttatcaagtgttcttctgtcaagaatctgccctttttcagcgagaatttcaccggtttccggatccaccagtgtttctgcaaggcgctggttaaacaggcggttcttgatatgaagctttttattaattttatagcgtcctacattcgcaaggtcgtatcgcttcggatcgaagaaacgggaatccagcaagctttttgcgttttctactgtaggcggctctccgggacgaaggcgctcatagatttcaagaagcgctttgtcactgttttcagtgttgtccttatccagtgtattgcggagatattcgttctcaccaatgagatcgagaatctcttggtcggaaccgaagccgagagcacgcaaaagaaccgtaaccggcaacttacgtgtgcgatcaatgcggacatacacaacatctttcgcatcagtttcgtattctaaccatgcgccacggtttggaatgacagtcgcggtaaaaccttttttaccgtttttgtctactttaccactgaaatatacacttggagaccgaacaagctgagatacgataacacgttctgcaccgttgatgataaaagtaccggtatcagtcataatagggaaatcacccatgaagacatcctggtcttttacctctccagtttctttgttaattaaacgaaccttcactctcagcggagctgagtaagtcacatcacgttcttttgactcttcaacgggatacttaggatctcctaaactgtagtcaatgaactctagagagaggttaccagtgaaatcctcaattggtgatatgtcttgaaacatctctctaagaccctcatcaagaaaccactgataagaagaggtttgaatttcaatgagatttggtaattctaacacttcgctaatgcgagcatagcttctgcgctggcggtgtcgtccatactgaactagttgacctgtcaactgattcacccctcaaatcatgcgtattatatgtgtaataagcatctcttacaataaagaaatacttttacaagacaaaagaaaaaagggtttctaattaagaaaaccacatccaaaaacaaataccgattttattagcatttccatgtttgtataatttatacatgcactatgattatttcagcatatcatgcaaaatatatacattggcattttacaatattaacatagctgaaaattcaagtcaaactttttttgcttttatgatataatagcctttctttttttgaaccacagaaacttcgtcaaaaagctccttcagtttttcaatggcagaaggcccgccctgttttttctgtataacgatccacaattcacctgaagcccttaaatgctcagcgcttttttcaaaaatggcatggacaactttttttccggcgcggattggggggtttgtaataatagaagcaaatgtttgagcagaatcaatatttgaaaataaatcactctgataaattcgaacgttttttattccgtttttttctgcattttcatttgacagctctacggctctttcattcacgtcaatcatgtgcacggtccggtctgtaaattcaccggcgagtgacagaccgatcgggccgtaaccgcagcctgcatccaggaagtcaccatcgatctccggctcttcaaacgcttcaattaagacacgcgaaccgaaatcaacttcctttttcgagaaaacgccgctgtcacttgtgaatgtataagatctgttccgcagtgtaaatgaccatgtctgtttatcgcttttaactgaaggtttttctgaataatagtgatcactcattattagaacctccttttataatggcacttaaagaaaagcaaagaaaaagcccgcctcataaaagcgagcttcccctacaggcaagtgaagattacttaacttctacagaagcgccaacttcttcaagtttagctttaagctcttcagcttcttctttcgcaataccttctttaagtggttttggagtgttgtcaacaagttctttagcttctttcaagccaagaccagtgatttcacgaacaactttgataactttgattttctgagaacctgcaccagcaaggataaggtcgaattcgctttgctcttcagcagcgccgccagcagcagctccgccagctacagctacaggagcagcagcagttacgccaaattcttcttcgattgcttttactaggtcgttcaattcaagtacagttgcttctttaacggaagcaatgatttcttcgatatttaaagccatttgaaattcctccatttgttttattttagggtaaaatcagattaagcgccttgttcttccttttggtctgcaactgctttagctgcaagtgcaaggttgcgaactggagcttgaagtacgctaagcaacatagaaagtaagccatcgcgtgaaggaagttcagcaagagctttcacttcttcaacagaagatacttttccttcgataacgcccgctttgatttccagagcttcgtgatttttcgcgaactcgttaagaacttttgccggagcgataacatcttcagtactgaatgcgatcgcattcggtccagttaagacatcattcaaaccatcaagttcagcttgttcaaccgcacggcgagtcattgtgtttttgtacactttgaactctacgttagcttcgcgaagctgtttacggagttcagttacttcagaaacgttaagtccgcggtagtcaacgatgatcgttgatttgctttctttcagtttagaagcaatctcttcaacaacaactttttttgtatcaattgcgctgctcatggttacacctcctgtagattttgtgtaacacttataccgctaggtgatcacgactgtgacgacgatttcatataaaaagcctccatgtggacatggaggctgtatatacaagcatacgtaacgtaatagctgtgatatatatacacctcggcaggatattaagcctcaacggcccctgctgtctacggtataaatgacatattatattttacaacattttgaatcatatcagaatgctgatctaaagtcaaatattattttacgttgaaagtagaagcgtctactttgacaccagggcccatagtagaagtaacggcaacgtttttcacgtaaacacctttagccgcagccggttttgctttcaggattgtatcatacattgttgtgaagttctcaacaagtttttcatcctcgaaagaaacttttccgatcggaacatggatgttaccagctttgtcaacgcggtattctactttaccagctttgatttcgccgattgctttttctacttcgaatgtaacagttcctgttttagggtttggcataagaccttttggtccaagcacacggccgattttaccgacttcacccatcatgtcaggagtcgcaacgattacatcgaattcgaaccagccttgctggattttcgcgatgtaatcagaatcgccaacgtagtctgcaccggcagcttcagcttcttttgctttttcgcctttagcgaatactagcacgcgctgagttttaccagttccgttaggaagtacaactgcaccgcggatttgctgatcgtttttacgagggtcaacccctaaacgaaaagcaacttcaactgtagcgtcgaatttagctgtgtttgtttttttagtaagcgccactgcttcagcgacgtcgtaagctttcgcacggtctacaagcttcgcagcttcaacgtactttttaccttttttagccattttaaaatttcctccttatgtggttatagcggaataacctcccacgaataagggttgcgaacttgtgaaaactcgcaacccgacaagaaacaaattaatcctcgataacgatacccatactgcgggcagtaccttcaaccatgcgcattgccgcttcaacgtctgctgcgtttaagtcaggcattttcgtttcagcgatttcgcgaaccttatcgcgcttaacggttgccactttattacggtttggttcaccagaaccagactcaattccagctgcttttttaagcaatactgcagcaggcggagtttttgtaataaatgtaaatgaacggtcttcgtaaaccgaaatttcaacaggaatgattaaaccagcttggtcagctgtacgagcgttaaactccttacagaatcccatgatatttacaccggcttgacctagtgcaggtccaactggcggcgctgggttagcttttccagcaggaatttgcaattttacaacttttactacttttttagccacgagacacacctccttaagtccgtgatgtggtaatagggtaaaccctcccactcaaggtttcattctttatatgaatgacgaaatatcaagctagctgccttggattagtccaagacgtacctttgctatattatcattaatatatagcaatttcaagttttttcacattacaatttgtcgatctgggtaaattccagttcaaccggcgtttcacggccgaacatgttaacgaatactttcactttgctcttatcataatcaatctcttcaattgatcctgtaaagttggcgaaaggtccgtctatgactttgactgtctcattcaattcaaaatcaatgtcggttttccgctcatccatgcccatgcgttttaagatggtttccgcttcgccaggaagaagcggagtcggctttgagcctgaaccggctgatccgacgaatccggtaacgcccggcgtgttgcggaccacataccaggaatcatcagtcatgacgatttcaacaagcacataacccgggaacactttctttttgactacttttttcttgccgttcttaatatcagtctcttcttcttcagggacgacaacgcggaaaattttatcctgcattcccattgattccacacgtttttcaaggttcgcttttactttgttttcataaccggaatacgtatgaacgacataccaattcttttccattctatcaggactctgcagtccttccctccccgcatttaaaaatgaagtgtaaaacaaaaaataggctcagggcctatgaatccttttttcaacaacacaataaaaaacccgctgaacgggttttggcaaacgatattatgatctattatagcacgtattgctgatcattattcaactattaaacgaattaattgagaaattcctgtatcaaggagggcaaaaaagataacaaaaaagataaccgttgaaatcaccgtgatcgtatagcgcgttaactctttgcctttaggccagctaacctttttcatttctttcccaacatctttaaagaaactcatcatgcgcatgtaaaagacctccacaatttaaaaagcgaacactattttgtttctaaatgagctgtatgtgaattgcaagtgctgcagtacttcttaacttctaaccgctcagccgctgatgcagagcttttcattgtcgtataattacgatttccgcatgttttgcatgccagcgtaatcttttttctcatgtcgttacaccttttcctaaacattcatttatcttaataaaatagcacagtcagaaaaattctgtcaatatgacacagaaacctgctacaggctgatctctcttatttctaaatacttttcaagcttgcgcttcacgcgctgcagggcattatcgattgattttacgtgtcggtttaagtcatctgaaatctcttggtaacttcttccgtccaagtacaaaacaagcacctttctctccagatcgctcagcagttctcccattttcatttcgatatcatcaaattcttcctgattaataatcatctcttcaggatttaacgttttagcgcctgaaatgacatcaagcagtgttctgtcagattcttcatcaaaaataggtttgtctaaagaaacataggaatttaaaggaatgtgtttctgacgggtagctgtctttattgcggtaataatctggcgggtaatgcataattctgcaaaagctttaaatgaagtaagcttgtcctctctaaagtctcggatagacttatataagcctatcatcccttcctgtacaatatcttctctgtcggcccctattaaaaaataagaccttgctttcgcccgtacaaaattacggtacttcgtaatcaagtaatctaacgcatcactatccccaacatgaaccttttcaatgacctgctcgtcctccaactggcaaaattgcactttgttgaactttcccttgctgttctgtagattcactgcgatccccccggcgcacgtagatagaaatattatacattaatgggcgaaaaagcgtcaacctaatccagaccgcctcggcgccacttttcaaacgttttcaaaacctcttcggacagctcgattttacccggtggtttttcagaagtgatctttgaaacccgcctttgaatccggcgttctatcgtatccacttccctcaggagctcccgggcggatttacggagagccccttgtccgaaaatcgcccactgctccgtataatcggaggttgcgacatgaatctgtgtcgcaatattattcagcgcctgggcaagcttctcgatccgctcatccgccgtttcattctcccgtgtgaaaatcacttcgactctgtgattcgtttgttttttctctatgccttttaccaggtgtgcgtcaaacaccacaatgactctgattcccgtgtaggactgatattccgccatcttctggatcagtacatctctcgcttcttcaaaactgttcgcttttaaatcctttagctgcggccaagctccaatcatgttgtatccgtctactaacaggatgtccatctgtcttcattcccctaaaggattgcgcttccggtagacttcatacatgagaaggccggccgctaccgacgcattcagagaagtgacttttccggccatcggaagcttaatgagaaaatcacatttctctttcacaagccggcccattcctctgccttcgcttccgataacgagcgccaaaggcatcttgccgtccatagagcggtagtcttcccgggcggatgcatccgttccgacgacccaaatcccccgctccttcatttcatcaagtgtccgggcaaggttggtcaccttcacgacgggaatgtgttcaatcgcaccggtcgaagcttttgcgaccgtcgaagtcagtccgaccgctctgcgtttcggaatcacgatgccgtgtgcaccgacagcgtcagccgttctcatgatggaaccgagattatgagggtcttccagctcgtccagtatgagaaagaaaggctgttcgtttctctcttccgctcttttatataattcgtctaattgtgcatattcatatgccgccacctgggcgacaacaccctgatgctgcccctccaccatctgatcgagttttttcctcggtacaaattgaatggtgacgccgcgctttttagcaagctccataacttgctgggcctgtccttttactgtgttttccgccatccataacttatacagcttgcgatctgacttcaacgtctcaatcaccgcgttttttcctatgacgtaatcatgttgctgactcatttgttttcctccctgacgtcccgacttgtatagcctcagcaatcagctgattcagtctttcttctcttttctcaagaaaaaggtatccgagtaaagcctcaaaagctgtactatggcggtacgtctgtacatctgtgtttttaggcgtcgtccctgatttcgcgtttctgcctcttctcagcacggcttcctcttcctccgtgaaaaaggattcgtcctgaaggcggaacaatatgtctgcctgtgattttgccgatacaatccggctcgccttcttatgaaggtcattcggtttcgtaaagccctgcttaagcaggtgatgccggacgtatatttcaaaaatggcatcacccatataagcaagcgcaagaccgtttaactgctttgaatctttgatttgttcaaattgaagcatccgcttactctccccgcttccagcgagttccctgggccgtatcttcaagaatgatattcatgcttttcagctgatcgcgaatctggtctgacaaagcaaaatcgcgattgcggcgggcttcatttctcttctcaatcaactcttcaatctcttcgtcgacaagctcttcttcgccgagcgtaagtccgagaacagatccgattctgtcaaacatgctgataaaggctttaatgacgtgatccgccgtattgtcttcctgcatgtagtaattggcgagcttcgccagatcaaaccaaacggaaatcgcattcgccgtattaaaatcatcatccattgcttcttcaaacgcagtgcggtgctcttcgattttagcgagccattcctcatcattgtcagtcagattcgtgctgctaatcaaacgatggtttaaattactgtaggccgtcttcaggcggttaaacgcgttttttgttttctcaagcagctcttccgaatagttgatcgggtggcggtaatgaacggacagcatgaaaaatctcaaaagctgcgggtcatattgcttaatgatatcgtgcaccaaaacaaagttgccgagcgattttgacattttctcattatcgatattgatatatccgttgtgaagccagtattttgcgaatgtcttgcctgttaatgcttcagattgggcgatttcgttttcatggtgcgggaatgtcaggtcctgaccgccggcatgaatatcgatttcgtcacccaaatactttttcaccattgcggagcattcaatatgccagccagggcggccttttccccaagggctatcccatgaaatttctccgtccttagcagctttccaaagagcaaagtccagcgcatcctctttcttctcgccgacacggatacgcgcgcctgatctgagttcatcaattgattgctgagatagtttgccgtacccttcgaaggcccttgttttgaaatagacgtcgccttctgattcataagcgtagccttttttaatcagttcgctgacaaattcaataatggcgtccatgttttccatgacccgggggtgaagatccgctttccggcatccgagggcgcccacgtcttcaaaatacgctttaatgaaccgttcagaaacggtcgggacgtcctcgccgagctcgttggccgccttaatcagtttgtcgtcaacatcggtgaaattcgatacgtattgaacatcgtatcctttatactctaaatagttgcgtacggtatcatacacaatcgccggacgggcgtttccgatatgaatatagttgtatacagtcggtccgcacacgtacatttttactttgccttcctcaagaggaacgaatgtttcctttttccgtgtcaatgtattataaagtgtaatggtcatttttggttgatcctttcttttttatcttccagttcagcctgcagttcaaaaatctgctgctccaatgctctaaacctgtcagcaaccggatcgggcaagtcttggtgattgagatcgcgtttgatttttcttccgttctgaatgacgactttccccggtatgccgacaacggtcgaaaagtcgggaacatcacgaagcacaacggagccggcccctactttagaaccctgcccgaccgtaatagagccgagcaccttcgctccggttgcaattaaagcatcatcttttatggtcggatgccgcttccccttttcttttcccgttcccccgagagtgacaccttggaataccgtcacgttattgccgatttcacatgtttcccctataacgacccccataccgtggtcaatgaaaaaccttctcccgatggtcgcgccgggatggatttcaattccggtaaagaaacgggcaatctgtgatatcaggcgcgccaggaagaaaaatctccgtttatataaagcatgtgcaatccgatgcgcccatatagcatgtaaaccagaataagttaaaacaacttcgaaatagcttcttgctgccggatcttgatcgaacactgtatctatgtcttcttttagcattttaaaaaacacatgcttccccccattctctccccgctccagtctgtttttccgcctataaaaaaagcgcctctgcatgtaaacatgacagagacgcttttaccgcgcggttccactctgtttgaaaaacaagtcactgttttcccaacttaaaagccggtaacggcggcggccgcctttaaatactgatttccgcagaaatgttcttcaaaggtcttaagggcgcacttctaaaacatgacgcatgaatctctctcagccgatgaagattctttctgtaatggtcattgttttatactcttccctgtcaacaatcgtatatttaaatgcttttcaggcgtctgacggctgtttctctgccgatcagctcaatggcctgcggaagctcaggaccgtgtgtctgaccggtaaccgctacgcgaatcggcatgaacagctttttgcctttatgacctgtttctttctgaacagctttgattgaggctttgatcagctcaggcgtaaattcttcaagctcttcaagcttcgcagcaaatacgctgagcacttcaggcacctgttcctcttccagaacggcttttgcctcttgattatactcgatctcatctttaaagaacaaatcagtcagctcgacaatttcagcgccgtagctcaattgctcatggtaaagagaaattaatttacgaacccattcctgctcctcggcagaaagctcagtgccgacttttcctgctttttgcaggtgcggcagggtcagctcaaccacttgatcaagatccagcgctttgacgtattggttgttgacccatttcagtttatgcatatcaaacagagccggtgacttagacaaacgattcacatcaaaaatttcaatgaattgttctcttgtgaaaagctcttcttcaccgacgggagaccagccgagaagtccgataaagttaaacagcgcttcaggcaggtaacccagctcatcatactgctcaataaactggataattgattcatcacgtttacttaattttttgcggctttcgtttacgataagcgtcatatgtccgaagacaggaacatcccagccgaatgcctggaaaatcatgatctgtttcggtgtatttgaaatgtgatcctcaccgcggagcacgtgcgtcattttcattaagtaatcgtcaatcgcgacggcaaagttatacgtcggtgttccgtcttttttgacgatgacaaagtcgccgatgccgtctgattcaaaagaaatctcgccttttacgatatcgttaaatgcgatgattttcccttccggcacgcggaaacggatgctcggctgtctgccttcggctaaaaactgctcctgctcttcctgagtcaggtttctgtgtttgccggaatagcgcggcatttccccgcgggcgatttgctcttcacgttctttctcaagttcttcttccgtacagaaacatttataagcaagccctttttcaagaagctcttcatagtactttttgtaaatgtcgttacgctcagactggcggtacgggccgtattctccgccgatatccacactttcatcccagtccatgccgagccatttcaaatagttgagctggctttgctctccgccttcaatatttcgctttttgtccgtatcctcaatccggataataaactttccgccttggctgcgggcaaataaatagttaaaaagcgccgttctggcgttaccgatatgcaaatgtccggtcggactcggtgcataacgaacgcgtacttcatttcccatgttcaaatacttcctttcatctcgtctgtagcctctagccgaatatatgtatctattctaccaccaaatagaccgggcatcaaaacaatgatcaggctttttggatcagaacggtcgcctgagcggcaattccttcggctcttccggtaaacccgagcttttctgtcgtcgtcgcttttacgtttacttgagagacgtctgcctcaaggccttccgctatccgttttctcatagcatcaatatgcggcgccattttcggcttttgcgcaataatcgtgcagtctatatttccgagtacgtaccctttttcttttacaatgttccagacatgctgaagcagcttaaaagagtccgcatccttgaattccggatcagtatccgggaaatgcttgccgatatctccttcacctgccgctccgagacacgcgtctgcgactgtatgcagcaatacatcagcatctgaatgtccgagcagccccttttcataaggaatttcaattccgccgatgatgagaggacggccttccgttaattgatgcacatcaaatccttgtccgattctaaacattatgattcccactttccgctttcatgattgcttccgcaaatatcaggtcatccggcgttgtcagcttaatattggtatagctgccttcaacgatactcacctgatatccatcaagacgctcgacgaggctggcgtcatccgtccctaagaagcctttgttttccgcttccatatgcgccgtcttcaataaagaaagacgaaaagcttgcggcgtttgaacggcccacaagcttgaacgatcaaaggtctccgcaacccgggagccttccgcccgttttatcgtgtctttcacaggaacagccaggacagccgctcccgcctcctctgctgtttccacgagcttatcgatatgctgatgtgtgacaaacgggcgcgctccgtcatgaacaaggacgacccagtccttatcaatcactttcagtccttcgtatacactgtgctgacgctccgcacctccggtaacaagctcaatttccgtctgaatcggaaattgggccagcagctggcgaaaatcttcccgttcactctcgtttatcaccaggattattttctgacagggtgcgtggctttcaaaaacccgcagtgtgtgtataataacaggcgcaccttttaagctgatgaacagcttatttttcccggccttcatccgttttccttgtccggcagccggaataacgacaacatactccatatgaactccctcttaaagagctttctcaagcagcttgggcttggcaaaaatcattcgtcccgccgctgtctgcagtacgctggttacgagcacatcaatatgtttccctatataattgcggccttcttccacaacaatcatcgtcccgtcatccaagtaagccacaccttgattatgctctttcccgtccttaatcacctgcacattcatctcttcgcccggaagcacaaccggcttcaccgcgtttgcaaggtcattaatattcagtaccgcaaccttctgaagctcacatactttatttaaattaaaatcattcgtcacaacgacgccggatgtcagcttcgcaagtttgacaagcttgctgtcaacctcctgaatgtcctcgaagtcgccttcataaatttcaaccgtaatatccagttccttttgaatgcgattcaagatatccagtccgcggcgtcctctgttacgttttaaaacatctgaagaatcagcgatatgctgtaattcctccagcacaaattgaggaatgacaatgacgccttctaaaaagcccgtctgacaaatatctgcaattctcccatcaataataacacttgtatccaagattttcagccttttatcctgttcctcctgctcctcatcagcacttccctttttcttctgcattcttgcagaaatggagaaaagactgatcagttcatcctttttcttaaatccgacttggaagcccaggtaaccgagaaagaaagccagaaagaccggaatgatggtgctgaatatacggtacggaatattgtccagcggaatcacgtttacaatgagatatgcgatgataagtccaaaaaccaatccgagactcccgaataacagatccggcaccggagctctcagcaaagaatcttcaatccattttacccaattaatcacatattctgtcgtccatatactgatgagaaaaaagataatagcaccaattgcagcagacgtatatgcgtttgttattaaaggtatgtcctgtatatttgacagcacaaacaattcaggtattaaaaagataccgacaacgccgcccacaataatgaagaacgcctgaactattcgttttaacatacctccacctccttttaagtagcattttttcagcagactgtcagagcctacaaattcagaataaacaaaaactaacaataatatacccggattccgacaggtttaagcgattcttaaagctgtctatctatatagtgtttttcctgaaggcgttttaagccttttttgatttttttggcgcgcacttcgccgataccctcaacatcatcaagctcttctacagtggcttccgttatgcttggcaaaaatccgaacgcctcaaccacattttcaacaatcggcatcggcagacgcggaattttgttcagcagcctgtatcctctcgggagcacataatcatcaatattggtagaagccggatatccaagcagcttaaacagaatggaatcatcaagcaggtcatagctggacatatcctgaagctcttttaacagcacgaacggatctttgattttttctttgacatagtctttgatgaaaagtgccgcctcttcttccatgtccgtaatcagttcaatcacctgcagacggattaagtggccttccgttccgagttctttaatatacatattgatttcattttttattcggagcaccatttcatatcgatgcatgacggacagcacgtcactgaatgtcacaagctcctcaaactctaatgcgtttaaagccgtaatcgttttgtctaaaatggttttatacttctcaagcgtttgaatggcctgatttgcctttgttaaaataaatcctatgtcctttagtgtgtacttcatgctgtcctgatataacgtaatgacatttctgcgctcagaaatggctatgacgagacagccggtctgcttcgccacccgttccgccgtacggtgcctcattcccgtttctgaagaagaaatggtcgcttccggcataagctgcgtattcgcataaagaattttctggccggaatcacttaaaataatggcaccgtccattttggccagctcgtataagtgagcgggcgcaaatgatgtattaatatgaaaaccgccatccacgacttgctttaccttatcattgtatccgacaacaatcaggccgcctgtatttgcccgaagtacattctctatcccggctctgagcggggtgcccggtgcaacgaactgcagaattgcagacaggtcaagctcttgtttcgccccttttttctctttttccatctattatgatcctcctaatgaagtacgaagcgcttctgcaacatttgctactccgacaacctcaatcccttttggtattgtccacccgtctgcattcgcctcaggtatgatcatgcgcttgaagccgagtttcgccgcttcctttacgcgctgttcgattcttgacaccctgcggacttctcctgtcagacccacttcaccgataaagcaatctgcgggattcggcggtgtatctctgaagcttgaggcaatgctgacggctactgccaaatcaatcgctggttcatccagtttgaccccgccggcgacctttaaatacgcatcttgattttgaagcaacagacccacccgcttctcaagcacagccataattaacgataccctgttgtggtcaatgcctgtagccatgcggcgcgggtttccaaaactggtcggtgaaatgagcgcctggatttcaaccagaatcggtctcgttccttccattgacgcaacgatactcgaacccgatgccccggcagaacgctcttccaagaaaatttcagaagggttcagcacttccgtaagcccctcttcccgcatttcaaagatgcccatttcatttgtggagccgaaacggttttttacggcccgcaaaatacggaatgtatggtgccgctctccttcaaagtatagaacggtatcgaccatgtgctcaagcaatctcggccccgcgatcgatccttcttttgtgacatgtccgacgataaaaataggtatgccgtttgttttcgcgattttcatcaattcggccgtacactctcttacttgtgatacactgccgggagctgaggtgatatcactttgataaacggtctgaatggagtctacgacaacaaatgcgggtttcatctcttgtatagcagacgaaatatactccatatcggtttcagataaaacatgtaacatttggctgttgattccaagtctgtcggcgcgcagcttcgtttgcttcacggattcttcccctgaaatgtaaagcacgctgccggccgtatctgctaattgtgcggatacttggagaaggagcgttgattttccgatcccgggatcgccgccgattaatactaacgagcctttcacaacgccgccgccaagcactctgttgaattcttcgagctttgtttgaacgcggggttcttccgatgtttcaattgatgtaatgggtgatggtttctggacggtttgaacggagtgggagaaagccgcccgccgattcgccggcgctttttttatggtttcttccaccattgtattccaagccccgcagcccgggcactttcccatccactttgcggattcataaccgcatgagtggcagatgaattttgtttttgatttagccatatatgttgtaagacctcttccttatcgaatatttctctatataacaaagtgaggcatacacttgcttacgtatgcctcatgtttgtcactatattagttcgttttagcagttgtttttacgacaaattcgccgtcctcaacatcaagaacaatgtgctggcctttatcaatattgcctctgaggagttcttctgataaccggtcctccacatgcttttgaatcgctcttcttaacggacgtgcgccgtattccaaatcgacgccctcttctgccacttttgcttttgcagcatccgtcagctcgatagagagatcttgttctttcagacgttttgttaactgatcagacataagcgacacgatgtctgtaaggtgttttttctcaagggagtggaagacgataatttcgtcaatccggttgataaactcaggtctgaaggcacgcttcagctctcccatgactttgtctttcatgtctttatggttttgtgattcatcctgcacattgaagcccacatatttgttgcgtttcagctcgctcgctccgacgtttgacgtcataatcaggatcgtgttgcggaaatccacagtgcgtccttttgaatcagtcaagcgtccgtcttcaagcacttgcaggagtatgttaaacacatcaggatgcgctttttcaatttcatcaagcaatacgacagaataaggttttcttctcactttttctgtcagctgaccgccttcatcatagccgacatatcccggaggagaaccgacaagacgtgaagtcgagtgtttctccatgtattcggacatatccactctgatcatcgcttcctcatcaccgaaaatggattccgccagcgctcttgccagctctgtcttcccaacgcctgtagggcctaggaagatgaatgaaccaatcgggcgtttcgggtccttcagaccggctcttgcacgtctgacggcctttgcaacggctacaacagcttcatcctggccgatgacgcgggagtgcagaatgttttccatattgagaagcttatctgtttccgtttgggcaattttagatacaggcaccccggtccagctggatacaaccatcgcgatatcctctacagaaacttcggagttctcctggccttgtttttctttccaggtttttttcgtgtcttccacctgttctctcaggcgctgctccgtatcacgaagggaagccgctttttcaaactcctggctctgaacggcagcgtctttttccttgcgaacttcatcgagtttctgctcaagctcttttaagttcggaggcgttgtgaacgaacggagacgcacttttgaaccggcttcatcaattaaatcgatcgctttatccggaaggaagcggtcagaaatataacggtcggacaattttaccgccgcttcaatcgcttcatcggtaatggatacgcggtgatgcgcttcatagcggtcacgaagcccttttaaaatttgaatgctttcatcggctgagggctgatccacctgaatcggctggaaacggcgctcgagagcggcgtctttttcgatatatttacggtattcatcaagcgttgtcgcaccgatgcattgaagctctccgcgggccagtgaaggttttaagatattcgacgcgtcaatcgcaccttctgctccccccgctccgatcagtgtatgcagttcgtcaatgaataaaataatattgccggcctgacgtatttcatccattacttttttcaagcggtcttcaaattctccgcggtatttcgtaccggctacaaccgtacccatgtctaatgtcattacgcgtttatcacgtaaaatttccggcacttcattattgatgatctgctgtgcgaggccttcagcaatcgcagttttacctacacccggttctccgataagaacggggttattcttcgttctgcggcttaatacctcaataacacgctgaatttctttgcttcggccgataaccggatcaagactgtcttccttcgcaatcgcagttaaatcacgcgccagactgtccagcgtcggcgtgtttgcattgctgttcgtaccggatgcagaagatcccgtctcattgcttcccagaagctgcagcacttgctgtctcgccttattcaagctgacaccgagattattcagaactctcgccgctacgccttctccttcacgaatcagtccgagaagtatgtgttctgttcccacataagaatgtcctagctttctggcttcatccatgctgagctcaatgactttttttgctcttggcgtataatgaatcgtttgagacatttcctgtccccgtccgattaagctctccacttctttctgaattttatccgaaccgagtccgagtgcttggagtgctttagccgcaatcccttctccttcacgaaccagacctaataagatatgttcagttccaatattgttatggcctaagcgcagtgcttcttcctgtgccagtgccaataccttttgagctcgctctgtaaaccttccaaacatcatatcgaatcatcctcctgtctatttgcactcatttctaaatgcagcctttccctgataagagccgctcttctcgcgtctctttcgttcggccgtaatgcaccgcccgaatattgctggagaaaacccggctgtgtcaaaatcatcagttcattaagtatattgcttgatagccctttaatgatccccaggtctatccccagccgaacgtcagaaaggcatttcgccgtttcctttgattcaatcatacggcagttggataaaacaccgtaagacctgaatacccggtcctccaattcaattttcgaggtttggtaaagcgcttctcgggctgaacgttcctgctcaatcagctgggcagccacactgtttaaatcatcgacaatgtcctgttctgattttccgagtgtgatttgatttgaaatttgaaagatatttcctaatgcttcgctgccttcaccgtaaattcctctaacaactaaacctaattggttaattgccggtataattcgattcatttgcctagttaatacaaggcccggcaaatgcatcatgactgaagcccttagtcccgtccctacatttgtaggacagcttgttaagtaccctctcttctctccaaaggcgtaatccactttctcctcaatccagtcatcaacctggtttgccgcttttatggcattgagaagctggaagccggggaagaggcattgaattctgatatgatcttcttcatttaacataatgctgacttcttcattttcagaaagcagacagccgccaaaaggggattccgttaaattcgggctgatcagatgtttctccatcagcacccgtttttccaaaggctgagcttcactcattctgattaaatgaaattgaccgatatcaggcagttcttttcctgaaaagtgatcttcgaattgctgaatgatggatgaggcttcttcattcgtataccgggcgggaaactttatattttcaaagtttcgggccaaccgtatacggctgctgagtacaatgtcactttcaggtcccttttgcttcatccaattgcttagtgcgtcctgaataaaatgcttgagcgacattacccttgttccccctcactgtctttactttttaacttctgctctaacgatcggatctgatccctgacctccgctgctctttcaaactcttcgtggtgtattaaagattcaagttctttttttaacatttccatttgccgtcttacatgcaggtttccgcctattcgttttggaattttcccggcatgcaccgtattcccgctgtgaacttttcgcaagatcggcgtaatttggctgtagaacgtatcgtaacattccgcacagccgaaacgccctgtttttctcagctgctgaaacgtcataccgcatttcttacaagctgtgccttgctctgagtagccgaacatttgagaaccggtgttttgaaatgaagactccatattcagcagccctgataataaattatggatcgagaacccttggtttccacttatactgtatgaatcgctattttcttttgcacattgttcacaaatatgaacttcttgtttttctccattaacaactttcgtaaagtgaaaagtggccggtctctcattgcattcttgacaaatcaatcttttcacccgcttactttagttttaaagatgtgagcattgctttcatcattctggctcttagttcatcccgttcgggcaaatcaatatatagaactgaacgatccattacactcaccatcattttagcttctctttccgaaataactccgtcctctaacagtctgagaataatgtcatcagaggctgcctgggacaagtgggtatgaatctgcgaaataatattattgatgaggacgacttcgttattcattttaattttgataatacgaatataaccgccgcctccccgtttactttcaacaatatatcctctttcacttgtaaatctggtgttgatgacataatttatttgggaaggaacacattgaaatttatcagcgatttcactgcgtttgatctctaaaatttctttgccattttgatctaatacttgtttcaagtactgttcaatgatgtcagaaatattatgtcccactcaaccccctcctttattgactttgactatatttgactttaatcttactataaggtgtttcgcaaaatttttcaactgtatcgctctatctctattatttccactttgcacaagcataaaacctgcttttgcaaaaaggcatatcgttacgtttctcatattatataacgtatgcagaaaaacacaaaaaaggcagctcatgatgagctgcctttaccgtaatgatagcttggcggcgtcctactctcacagggggaaacccccgactaccatcggcgctgaagagcttaacttccgtgttcggcatgggaacgggtgtgacctcttcgctatcgccaccaaaccattgagagtgttctctcaaaactagataacagtaagcatacattcaaattggttaagtcctcgatcgattagtatctgtcagctccatgtgtcgccacacttccacctcagacctatcaacctgatcatctttcagggatcttacttccttgcggaatgggaaatctcatcttgaggggggcttcatgcttagatgctttcagcacttatcccgtccgcacatagctacccagcgatgcccttggcagaacaactggtacaccagcggtgcgtccatcccggtcctctcgtactaaggacagctcctctcaaatttcctgcgcccgcgacggatagggaccgaactgtctcacgacgttctgaacccagctcgcgtaccgctttaatgggcgaacagcccaacccttgggaccgactacagccccaggatgcgatgagccgacatcgaggtttttcaccttaacccgacactgccattgatttttctgcataatgcgctgaaccgttttatggttaatacacattctcttttttagtatggctgtgatttttcgatatccatatcgatacttgtgctctcggcacaacgtgccgatttgtttttccaaatggcgcttgggatgatccttcatcagattcttcttccaacgataataagacgctcgagagatacctaaatgaatacagatatcctgtacggtcattgtgctgtgcaatatttctacaagttcgactgacgtttcgctatcaacttcctttccaattcgttgtacttttttaaaacttcattctgttgtctcaggtaacgaatctctgcctgcagtttctctaaatcggaagaatactccggaccttttccgtaagtgtattgctttccaacaggctgttcgaatcgatgtgtatcaccagccttataccatctaacccatgtctgaacctgtgtcttattcttaatattcaactcctgcatgatctctttcataggtacgcctgccaatctcatttctacagccttctgtttcgcttcaaccggataactcactcttgtccccatagaaaaaacacctccaagtctaatttcggataacaacgatccgttttcaaacttgaaggtgttttttgtttgtctcatattatggggtcagtcccgcgctgcagggttctttttttggttattgggattttacggcttgcacgcgggctctgcttttccggtttttcaagtaataagcggkgtagcaaacggccataaatgcaattccgcaataaagggcgatggcctggttcggatcaaaagcgatgccgatacaggaggcgaggcataggagaaaggccgctatcggtacggccggatatcccggtgtcctgtatttcaagtctgaaagctggtgcccttctgtaagaaaccgtcttcggaacaaaaattgcgatgcggcaatgctcatccacacagcaactaccgcaaatcctgagacggagacgagaacaagatagactgtatccgctgcaaatacgcttgacaacaacgacagaatgccgccgatcatactgaagatcagagcgttaaaaggaatgccttttgaggtcagcctggcaaaggcgggatgaagctccccttctttagacagggaccacagcatacgtgatgacgcgtacagccctgaattggccgcagacagaagcgccgttaaaatgacgaaattcatcagatcggccgcataaggcacgccgactctgtcaaataccgtgacaaacgggctttcaatcacaccggcttccttgatggagatcatccctgacagcacaaaaatcgttccgataaagaaaagcgccagccgccagactgtagtcttaatggcgcgcggaacggttttttccggatcggcgctttcccctgcggcgattccgatcaattccgtccctgaaaaagcgaagtttactgaaagcatcgtcatcagtatcgggaaaaagccatttggaaaaaggctgccgccatccgtaaagttcgacagcataggtgcggcctcaccgcttttcatcgggacgatgccgaacatcgccgctccgcccaataaaataaacagtaagatggctaagactttaatgcttgagaaccaaaactccgattcagcaaaaaatttcacggagaaggcgtttaataaaaagatgaaaagagcgaataccgcactccacatccaaactgaagtatgcgggaaccagcgctgcatgaaaagcccggccgccgtgaattcagagcccagcgccaccgcccacgtcagccagtacagccatgcgaccgtaaagcccgtcgcgggcccgatataggtcttcgcataggtgtggaatgcgcccgtcaccggcatggccactgacagttcaccgaggcaaagcatgacaagatagacgatgcccgcgcccaaaaggtaagcgaaaatggtgcccgccggacccgcctgatgaatggtatacccagagcttaaaaacagccccgttccgatcacacctccgagtgatagcataaagaggtgtctgcttttcatacttctctgaaaattcgtctcgttcttgttgttcattgttttccaactttctgcgagagccgttctaataaaaaatctcatgccggcgaacggcacgagattccggcgaaccggctttttgaatagaatatacaaactattccgattagtcaagttgtttttaaggtcttggcccaatcggcaatggcttggatgtccgcgggtttcgtccggcagcagcctccgatcaggctcacgccgttttcgtaccagctttgcgcgctttttccgaaatggttttcgcacgctgcgcctttccaggtttttgtcactgggtcatattgttcgccggagttcggataggcgataatcggtttggacgttgcccgtttgatttcttctatcagcggcggaatatgttcaatcggtgtgcagttgatgccgatcgctgcgatttggctgcaggagtcaagcagggccgcacattcggaaataggcgtgccttcgctgatatgccgtccgtctttggcgctgaagctcatccatgcataagtgccggggaattcctccagcagccttgtgatcgcttttgcttctgacagacacggaatggtctcacaggccaaaagatcggcgccggattctataagggctttcatccgggggcggtgaaagctgatcagctcatcctccgtcagtccgtaatgcccgcgatattctgagccgtcagcgaggctcgcgccgtaaggtccgatagaagcggcgaccaaaggtttgggccggtgtaaacggttttcttcatgcgcccaaaattcatcgcgtgcttgtgcggcaagttcaacagatgtctgaatgagacgtatcgcatcggtttccgggatgccgcgcgctgcaaatccttcgattgtcgattgataactggcggtgatcgcgcaatcagcgccggcggcaaaatattctgcatgcacctgtttgatcagttctggcctctccaaaagaattttggccgaccacagatcgtcatgtaaatcacagcccatccgctcaagctcggttgccatcgcgccgtctatgatcataaccgggtattcatttaatatttgtgtaatgggattcataggccttcctttctgactttactgaaaatatataaaaagggtaatggatgctattctctttgtcaatgaaccggcagaaaaaaggtgttcaggacgctgcccgaacaccttttgtttaggaaatgtgtttgcctttcgcacttttcgcgatgtctgaatactcccagcagtcgatcccgtcatcatcagggagcacatctctgtaaaagacggggtcctttccggctttcttttgccggacataatcgctcaaagcggcaaacgcttttttcgacagaaggaaaatcgcgattaagttcacgaccaccattaagcccatgaacaagtcagccatatcccacacaagctggactttggaaatacagccgaacagtaccattccgagcacgcagatgcggtaaatgaacagccattttttgttctggcttaaaaatccgatattggtttctccgtaataatagttgcccatcagagcgctgaagccgaacaaaagcattaagacggcaaggaaacctgacgcccatgcgccgacatgatcgctcaaggcggcctgagaaagcgcgatgccgctcagtcccggctggtgatacgcgtctgaaaataaaatgataagcgccgtgcttgtacaaatgacgagcgtatccgtcaggacgccgaatgcctgaatgagcccctgtttcaccgggtggctcgtcgtagctgtcgccgccgcgttcggagcgcttcccatacccgcttcatttgagaaaatcccgcgtcttacaccttgcatcaaggccgcacctaaagcgccgcccgctgcctgatcaatgccgaacgcattttttacgattagcgacagaacgccgggcaattgggtgatgttcgtcagaatgacaaagaaagcgacaccgatatataaaacggccaagacgactacgatgtattccgccattttcgcaattcgtttgacgccgccgaaaatcacgccgccgaaaaccacgattaaaataatgcccaatgtaagccggctggtgccgaatgcgttttgaaaggcgacgctgatcgtattggattgaacggaattaaaaacaaccccgaatgacagtgtgattaatacggcgaacagcgcgcccatccagcgtttcttcaggcccttttccatgtaataggccgggcccccgcggaatccgttttgatcttttactttataaatttgggccagcgtgctttcaacaaagcttgaagccgaaccgatgactgcgataatccacatccagaaaatagcgcccggaccgccgagtgagatcgcaatggcgattccggtaatattcccggttccgacacgcgccgccatactgatgcaaaatgcctgaaacggggaaatgctgttttttgtccgggcggccgcgccttccttcaaaacccggatcatttccttcagcatgcggacttgcagaccctttgatctgaacgtaaaaaacagtcccagagaaagaagcagtacgattaacagttttgaccataaaaaatcatttgccgagccgattacattttcaaggaattcctgcatccaatcacctcttggttcgtttgattaaaaaatactgagctcccactcctgtgcgatatgtttcagcagcatgccgccggtcaggctgttgccgtattcatcaatggccggaccgtaaatgccgatgccgcagccgttatgaaaaggctgttctcttctggcgcttgggggaaccaatgccataatgccgccggataccccgcttttggccgggacgccgacgaaagccgcatatttgcctgacgcattgtacattccgcacgtcagcatcagggctttggcgagtttcgcgacatctttcggaatgacctgttcccgtcggatcggatggtatccgtcatgcgcaagtatcaatccgattaaagcgatgtcctcggttgtaccctccatggcgcactgctttaaatacacttcaagcgtttcttccacatccgcctcgagaaagttcgtttcttttaaatagtaggcgagcgctcggttccgatgcgcggtctgccattcagaacggaagacctcctcgtgaatgtgtgggcgttttcctattaatttttcaaaaacggaaaagagatattctaatttatcatgcgccgtttcacccggaagcagcgaggcgacggtaatggcgccggcattgatcatcgggttgaagggcttcccgggtttatggatttcaagccggatgatagaattaaacgcatcacccgtcggttccacgtccacacgatccagcacgtaagaaatgcctctgttcatgcaggcggcaataaagctgatgacttttgagatgctctgcaatgtgaacgggacattccattcaccggcatgaatcattgagccatccggctctaatatgcaaatgcccagctgagagtcgttgatttctccgagggcgggtatataatttgcgctttttccattgacggaaaacggtcggtaatgctcgacccaatcttgtaaaagtgaagccagttcctctttttcaaggcgctctctgaccatatctttcataacattcctcctctattgcaagcctgtccgaagcggaaaccggtcttggaaaacgttttcaaaaatagcgtgttccatgttaatgtataatgacatctacagaatcatacaaaatacgacaaaatcattcttaaaataagccgatagatttataaatcagccggagcgtcccgtcattcgggtctaaagaaatttgcggactgtatcggtcttgttcaaaatagacagaagaaggaagtgattatgatcaggctcgactatttactgaaaaaagacggctatcttttcgcccttatgctgatcaccgtgccgctggcgggggaactgaaattttaccccctgaatgaggtatatcggatcagcttcggcgccccggcttttttcttttttctgctgctgcttcggcatgtgccggcagtattgtcagggctgttgacaggtgcagccgttgtggcattccggatcggcctggcgtgctggggaggagagcatgccggctttacggaggtttttttcagccaatatcccagtttctttttttactttacatatgcctgcttgttttatgtgctgaaggtcaggcttttttgggatcggccgctgatgatcgggtttctcggttttctcattgaaattgcgtccgatgtcgttgaaatgacggttcagttttccggcggccggcagattatgatgccggacaagctggcggatattgcggttatcgctgtttctcacacatttattgtgctgagttttttcaacgtgatgaagctgcacgaatctcaggtcagggaaaaacaaacgagaaagcagcatgagcatatgctgatgattgtgtctaacttatatgaagaaacgattcatttgaaaaaaacgctgaaaacgacggagcatgtgacgaaagaatcctatcagctatatcgggaaatgagcgggaacgaccgggagctcgggagccgaatgctgcgacttgcgggagaaattcatgaagtgaaaaaagacaatcagcgaatattcgccggtttgtcgaagctgatttccaatgagagattccgggattacatgaatgccgccgctctggtcggcatcgtcatccgaatcaatgaaaaatacgccgaatctttaggaaaggacattcaattccggagcgtgattgaaggagagcatcccgattatcacgtctttaccgtcttgtcgattttaaataacctgaccgccaatgccgtcgaagccatgggtgacaggggtgagatccgcctcgcgctgcgcagggcggagggggagatggccgaatttcaggcggaagatgacggtcccggcattccggaaaaaatcggagaggtcgtttatgatcccgggtttacatccaaatacgatgaattcggcacaccttcaacgggcatcgggcttacttacgtgaaggaaatcgtaactgaacttgacggagacatttcctttcataacaagccaaaaggcgtcatatttacgattaaactgccggtgaagcatttgattgcagaaaggatgaactcataatatgcgtttttttatagctgatgatgaccgggcgatccgttccattttaaaacagatgatcgaggacgaggatttaggcgaagtcgtcggtgaggcagaggacggaagccagattgaagggcattatctccattttaaacaagtcgatattttattaattgatctgctgatgccgggtcgggacgggattgagacgatccggcatcttcaggggtcgtacaacggaaaagcggtgatgatatcgcaggtggaggcaaaggaaatggtgggagaagcttattctctcggcatcgaatactttatccacaaaccgatcaacaaaatcgagattgtcaccgttttgcgaaaagtaaaagagcggattgaactggaaacctcgatcggcgacatccaacactcgttaagccgtcttattcagcggaatgagccaaaaaaaagcgggccgggggggatgcacgagaaatcaatcaaagaaacaggaaaatttcttttatcggaattaggcatcgtgggagaaagcggggcgcatgacctcatggccgtccttcactatttatttgaggatgaacaggcggaaagaaacatcccgtctttaaagcagatgtttacaaacgtcgccatccggaagctggggcctgcggcggcacaagccgaggttaacagggaaatcaaagcctcggaacagcggatcagaagggccgtcattcattcgttaaaccatttcgcttcattgggcacaactgatttttcaaaccccaaatttgaatattacgcctcgaaattctttgatttccccgctgtcagcaagagaatgaaagaaatgcaggctaaggaaaccgtgccgctttctcgggttaaagtgaatatgaaaaaattcattcacgtcttctttttggaggcgaaagatttacgcgaaggatcaaaatttgtcagcggaggcagccggtaagctggcattggaaaagatggcaaacgtggataaatgacagctcgtactggcttgattttttccgcgctgatccatggcttgcaccctccgcatatttttgtaaacgaaaatcagcatgtgacagaatggcaggccgcttaccctgtggaaacggcgaagttcgcgcttcagacggggcaagaggagcatatgcaaatggcgcgggacatgctcggcctgaccgatccgaaaggttattgacttccgccggatgacagcgtatgatacattttaaaataaaagaacggatgaacaatgctgaggaagagtaagtacgcatcagcgcgcggggttcagagagtcggtggccgctgtgaaccgatccccgtccggtgccgaatgggcttctgaattgctgcgctgaaatgacagtaggcggtgccgggattctttccccgttatcaagaaaggagtattgaaaccgtgtgtttctgtactttttgagagaatggcttatcagccgttaataaaggtggcaccgcgaaaacctcgtcctttgatggacggggtttttttgtattgttaaggaggtgatggccatggaaagtgactggagacgggcagacaatcaaaaaaggagggatattcatggtgatcgcaaccgacgatcttgagctcacgtgtccgcattgtgaaggaaccggcgaggagaaggaagggacgccctgtccgaagtgcggcgcgaagggcgtcatattgaccgctcaaggaaacacgctgctgcattttatcagaaagcatattgatcagtgaaatcaaacgaaaaaggccgttatccggccttcatgctgtcgagaaaatctcgacagcctttatttttcccttgtcataaaataaaagaaagactgaaaaaaacggtttctttctcatgttccacacaagaaatttttctcaaaacagagccgaattcgttctgtttgaccaactcgtcgaagaggatcaccttcttcgaaaaattgataaatacatagacttctctttcattgttgaaaaggtcaagccttactgcaacgaaaataaagaccgcccctcacttgatccgctgaccttattcaaaatgatgttgaagattgccacatacccagccaagcaaagctaggcatgtgggagtgctttttctgcacctgaaatcaaatgaatatgtaaagaaacagcacaaaacaaaaaagcttgcagaaaaaacatcgttttctctacaagctgctttttcattcttcaaaataaggattcacatggatgagcacttcttcaacatctgaaaagtgtctttggatttcatttcggatttcgcgggcaatatcgtgtccctgcttaatcgtcaaatcatgatccaaagataaccggacatcaagcaatttatagtggccgtgttctcttgctcggattttatcgagccgtttgacttgagggcagtgcaaaataacggctttatattcctctatcagttcgggatcaacacttttttccatgagaacgtcaacagacggcctgattaattccattgaaatcttaaaaatgaggtacgccacgatgacactggcaattgcatcggcgtacaacagataggaccatccgcgtgtgttcccgataatcgccaataggacgccgataaaagcggcaagagaggcaacgatatcgcctttatgatcgtatgcaatcgctataatcgctttactgttccatttttccccttgtttgatcgaataacgatataagatctgcttagccgcgtaggatatcagagccgcaaacaatgcgctgtattgcgggatgcttggaccttcaacaaaggacgaaatcgcttctatcagaatatacacggaaacgagcactaatatgattcctacaatcgcttcgctgatgacctcagctttgccatgcccgaaaggatggtcttgatcgggcggcttattagaaatgccgatgacggccaggacagcaattgaagccacgacatccgctgcagaatgtataccgtcggcaaaaactgcttcactatcgcctatcagtccaaaaaagatctttcctgccattaagatcagattggctatcaatgcaatcaaagcaacttttttgcttatttgttctctttcacttgtcattttttcctcctataaaactgcacaaaaaaatagaggcgcttttgattcgctctccgtatcctttcttgtgtaatcactttgcttatcgtaccaattcagtttcgagtgggtctatagcaaggttttttcctgtttactaataaataaggtgacagaaaaaaagttggagcagggctaaacagtacacagacaaaatggggctgaattaaaaaaagaactgttgacatttgagtatttatcttttattattatctcgaattcaagattttttaattcaagataatttaattagagtgcaggataagaacctgctgatcgtttgaatcacgaaaagatcagtgaagagaacgtttcgttttttgatcatatgttatttggttttttatactataatatctcgaattcgagataaagggggtacgagagaaatggctgaatttgtacagctagtgaatgaaagaagatctgcaagcaattttcttccagaacatccaatcacaagagatgaactcaacgaaatgtttgaattggttgcgttggctccatcagcttttaatttgcagcacacaaaatatgtgacggttcttgacccggatgtaaaagaaaagctgaagcaggccgcaaacggacaatataaagtgtttagctcatcagctgttcttttggttttaggggataagcaggcatatcagcaagcggctgacatctatgaaggattgaagatgctgggggtattaaataaacaagagtatgatcacatggttcaagacaccgtttcgttttatgaaaacaggggagaaccatttaagagagatgaggcgataagaaatgcttcactttctgcgatgatgtttatgctgagtgctaaggaaaaaggctgggacacctgtccgatgatagggtttgatgctgaagccgtgaaacagattttgaatatagatgatcaatttgaggtcgtcatgatgattacaatcgggaaagaaaaaatagaaagcagaaggccgcgcggctaccgaaagcctgtgaatgagtttgtggagtatatttaactatttgtaaaggagcgaataaaaatggcgaaaaaaacgatgggcatccatcatattacggcgattgtcggtcaccctcaagagaatgctgatttctacgctggagtgctggggctgcgattggtcaagcaaacggtcaattttgatgatccgggtacgtatcacctttattttggggatgaaggcgggaagccgggaacaatcatcacattctttccatgggcgggcgcccgccaaggcatcattggagacggacaggttggcgtgacatcttacgccgtgccgaagggtgccgtggcgttttgggaaaagagacttgaaaagttcaacattccatacacaaaaattgagcgttttggagaacagtatatagaatttgatgacccgcacggtctgcacttagaaatcgtggaaagagaagaaggagaagccaatacgtggacgttcggagacgtaaccccggatgttgccattaaaggctttggcggtgcgaccctgttatcagcacagcctgaaaaaacaggtaaactgctggaaaacatcatgggacttgagcgagtcggtaaagaaggcgacttcgttcgttatcgttctgccggtgatatcggaaatgtgattgatcttaaattaacgcctatcggccgcgggcaaatgggtgtcggcacggtccatcacatcgcttggcgggctcaggatgacgaagatcaattagattggcaaaggttcattgctgcgcacggatatggtgtgactcctgttcaggatagaaactattttaatgcggtttacttcagagaacatggggaaatcttatttgagatcgcaactgatccgcctggctttgcccatgatgagtcacaagaaacaatgggcggaaaactgatgctccctgagcagtatgaaccgcaccgggcacaaattgaacaagggctgctgccgtttgaagtgagagaattagattgattgatagatgaacgtgaagcatgaagaaaaataacaagacatacatttaacagatgtttgctggaagcgactgttggtaaacagctgccttgcagacatcatataatatgaaaaataaggagagataaaaatggaagatgcaggactattacttattcgaatcatgattggtgtggtgtttctgttttatggatcacaaaaattattcggctggtttggcggatacggaattaaaggaaccggacaatggttcgagtcaattggagttaaaccaggcaatgccgcggccgctttatcaggtctcggggaactcgcaagcggaattctatttattttaggtgttttcctcccgctcggagctgctattataacgattattatgttaggtgccatcgtaaaagtccatggagcgaaaggatttgccaacggtgccggcggttttgaatataacttggtgctgattgcagtctccatcggagttgcactcatcggttcaggggcgtacgctttgcatttttaatataagtatctaagaacagttactgaaaagcggtaactgttcttttattttttaagcaaaacgttcaggtgctctgaatatcaaaaaagcggatatgatcaatataaatgtgtatagtgaatgtacgagtattgatgagcttggtcatgaaagacgagccgatttgaaggaggattttgatgaaagagctgacagacttacattcattagattctatcgagaattttattaagcagcatcaattcagttttatctacatttcaagacccgcctgtacagtatgtcacgctgttctgccgcagctcagaaaagtattggatcagtttccgaatatcaaattggggcatatcaatgctgacgaggtagaagaggtggccggcagattttcagtcttcactgttcccgtgcttcttttgttcattgatgggactgagtttctgagagaagcccgctttgttcattttgaacagctcgaagaaaggctgaaaagggtttatcagttatatcaagatgtataaagcgtttatactttacaaataaaaagccccctttaaaggggcttttatccggccttttttacgttattcggaccggggttctaaaaaacgggacccgcccaagtcttttctcatcagatagatatggaaaaaatattctccgacggcgatgatgacggcggaaataagagcggcaaacgccagtcttcctccggaaatgcccatggacagcggcattcccatcagccagacaacaagaaacgcgattccgaaatcagcggatgccgccgtgatattattccatctcggaagcacgtacaggtcgcccgtaaagtaagaaacggctcccagcacaatggtcatcagcagcacgtcgccgaatgtaaagcgaaaacctaagccgagtatcagatacagaataatgatggtcataatgcctttaatggcaagcgctttaatgtgttccatgcgaattcctccttatggaaatcatgttagtatgtttcctcataacgtgaaatataaacccttttttcgtgaacatttgttttctggcttttgtctgtcatcactgggccgcggctgaatatgatgaagggagaaaatacgggaggtgtcatgatggcagtcgtaaaagcgtcgagcgccgatctggatctaatggcaaggctgctcagggcggaagcggaaggcgaagggaagcagggaatgcttttggtcggcaatgtgggaatcaatcgggtgcgggcgaattgttctgattttaaaggcctgcgcaccatcaggcagatggtgtttcagccgcacgcgtttgaagcggtgactcacggatacttttaccagagaccgcgtgaatccgagcggaggcttgcccgccggacgattaacggagaacggttttggccggctaagttcagtttgtggtattttaagccgccgggaaactgcccgccgacttggtatgatcagccgtttgtcgcgagattcaaatcccactgcttctatcagccgacaggtgaaacgtgcgaaaacgtgtacaatacattttaatcccgggcgcaccgttctgagaatgaacggtgtttttttaattttttgtgaagaaaaacaggaaaaaagttcgcttgacggatgacaagccaaaaagaaacagagggggttttctcccggcggggcaaggtttgtcgaaacaatgtgaaaaatgtctcccgccgtccatttttcagccttacaaacccttcacagttcttcatagcggtttaacatttcttttttataataagggcgatcaatgagacgaaaggggaactgacatgacacatgacggccgtttagatgaatggatcaaggaattggagaacaaaagctttcagaacaatacgtttgaccgccgcgcatttatacagggcgccggtaaaatcgccggtctttccctcgggttagcgatcgcgcaatccatcggcgcgtttgaagtgaatgccgctccgaaattttcaaactatccgttcaccctcggcgtagcttccggcgacccgctgtctgacagcgtcattctctggacgcgtcttgcccctgacccgctgaatgggggcggcatgccgaagcaggccgtgccggtaaaatgggaaatcgccgctgatgaacattttcgtcacatcgtcaaacgcggaacggaaatggccaagccgaatctcggacactccgtccatgtcgaggcggacgggctcaagcccaataaagtgtactattaccggtttaaaagcgggcatgagctcagtcccgtcggccggacgaaaacgctgcccgctcccggcgctgacgtatccgccatgacgtttgcatttgcctcatgccagcagtatgaacacggctattatacggcatataaacatatggcgaaggaaaagcttgatctcgtattccatctcggagattacatttatgaatacggaccgaacgaatatgtgtcaaaaacgggaaatgtcaggacgcacagcagcgctgaagtgtatacactgtcagattaccgcaaccgtcatgcccaataccgctctgatgccaatctgaaagccgcccacgccgcatttccgtgggtcgtgacgtgggacgatcatgaggtggaaaacaattatgccaatgttatccctgaaaaaggccaatccgttgaagcgtttgtgctcaggagggccgcagcttaccaggcttattatgaacacatgccgctcaggcgaatgtcattgccgaacggtcctgatatgcggctgtacaggcaattttcttatggcaatttagcatcgttcaatgtgcttgatacaagacagtacagagatgatcaggccaacggcgacgggaataagccgccttctgatgagtggagtgatccgaagcgtacattgatggggacagaacaggagcaatggctcttcggaaatttagccgcctcaaaagcgaagtggaatgtgctggcgcagcaaatctttttcgcgcaatggaatttcggaacaaccgccaatccgatatacagcatggattcatgggacggctacccggctcagcgggagcgggtcatcaattttataaaaagcaaaaacctgaacaatgtcatcgtgctgacgggtgatgttcacgcaagctgggcgtcaaacctgcataccgattttaatcaaacgaattcaaagattttcggagccgaattcgtcgggacctccattacatctggaggaaacggggcggataaacgggccgatacggatcagatcttaaaacaaaacccgcatattaagtttttcaacgattaccgcggctatgtccgctgtacggtgacccctgcccaatggagagcggattacagagtggtgccgtacgtgacggagccgggggctgaggtatccacgcgggcttcattcatttatcagaaagaccagacggggattcggaaggtctctcaagctgcggttgcaggcggtgtaaagcagtcaaaagaggtggaagaggatcgtttcttcgcccataacaatgcgcatgaaaagcaaatgagaaagaaacgggccaaaatctcacaataaggaggcacactcatgttttctaatatcggcattcccgggttgatcctgatcttcgtcatcgctctcatcattttcgggccttcaaagcttccggaaatcggccgtgccgccggccgcacgctgcttgaatttaaaagcgccgcaaaaacactggtctcaaatgaagagccggacaagcagacggctgagaaagacaaaacggcaggctgaatcctgacatgggggcagacgaatccgcttctgcctctttctctataaggaggatgtacgattggataaaaaagaaacccacttgatcgggcatttagaggagattcggcagcgtctcattaaaaccgttatcgcctttctcgtgttttttatcggcgcctgctggtttgtgcaggatatttatgactggctgatcaaggatttggatggcaggctggccgttttagggccgagtgagattttatgggtgtatatgatgattgcgggaatatgcgcccttacggcaacgattccggttgccgcttttcagctctggcgttttacggcgccggctttgaccccgtttgaacgccgcgccgctttgctttacattccggggctttcggttttgtttattatcggaatttccttcgggtattttgtgctgtttccgattgtgctcggctttttaacacaattatccgccggccattttgacatggtatttacggcggacaagtattttacctttatgctgaatcttacattgccgttcggatttttgtttgaaatgcctctggccgtcatgtttctgacacggctcggaatcgtgaatccaacccggctggcaaaggcgcggaagctttcgtattttgtgctgatcgtcgtctcggtgctgattacgcctccggattttatgtctgactttctcgtcatgattccgctgctcgtcctctatgaaatcagtgtgacgctgtcccgcatcgtttaccggaagaaatgggccgaggcgccgtctgcagcttagtgaagttcgcctccgccggtctcagtatcgtcctcatgcgccgcggcggtcaccgcggcgattttgagcgcttttgtcacgagatccaggctgaggctcggcgcagacttctgcaaggtttgctccggaatgtacgggatgtgtataaacccgccgcggatgtgcggatgatggcggctgatttcatccatcagcccgtaaaagagatgattgcatacaaacgtccccgccgtgtaggatacagccgcgggaatgccttcctttttgatttcctcaacgatccgtttgatcggaaggccggtccaataggccgcgggaccgtcttgagaaatgttttccccgacaggctggtttccttcgttatccggtatgcgcgcctcattgagattgatcgcgacccgttccggcgtgatctgcattctgccgcctgcctgtccgacacagatgataatgtcaggctgatgctttttgatcgcctcgcgcagcacggcaagagacttataaaaaacggtcggcacttgttcagatacgatagaggcagggccatcagcggcaccattcagccgtttgaccgcttcccatgaaggattgaccgtttccccgccgaaggggtcaaagcctgtcagcaatacttttttctccatataaaaccctccttttctttttaccatactctataatggacatatattcctgccgaagggggaaacacgtcttgaactcgcctctggtgcaataccgatctttatttccggcgctccgcacacatacgatgctcgccagctgctctcaaagcgctcttgccctgccggtttcaaaagcgatcaatgactatcaggaaagcctgcttcagcatggcggaaactgggaagaagccattggacgaacggagcgggcaaggtgtgaatttgcgaaattgatcggcgcccatcctgaagaaatcgccgttttaccttcagtaacggctgctgtctctgccgccgtttctgctttaccggattgccgaaagaaacaggcggtgtatacggaattggattttccggcgatcgcccacattttgaaggcacagactgagatggagctttcagtcgtgccgtctgaagatggaatgatcccgttagagcggtatgagacgtacatatcggaacagacgcttttcacctgtgtgccccatgtgtcctatacgtccggttttgtccaggatatgaagcgcattgccgagatatccgcaaagaagggatcgcttctttttgtcgatgcttatcaatcagcggggcacatcccgattgatgtaaaagaatggggagttgatatgctggccgcgggtgcgagaaagtatatgctcggcataccgggaacggcgtttctttatgtcagaaaggaacttgccgaacggctgaagccgaaagtcaccggatggttcgggcagcagcgggcgtcgatgctggatttaacccgtttttcttatgcggacggagccaaacgctttgagaccggaaccccggcatttatcagcatatatgcggcacaggcggcattatctctattaaatgatgccggcacagaccgcattcaccgggaagtaaaaaaactcagcacatttgcgtatgaatacgcttctgaaaaagggttgcacctcacagggcctccgtctgccgatgacagacccggcatgatttccatacgggatgaaaaagcggcggaaacggctgcgctgttgaggcggaaaaacatcgtatgcgcacccagcggacatatcatccggctggcgcctcatttctataacacggctgacgatctgatctatgcgattgatgaactggctgaagcgcgcggtatataaaaaaacagcagactcacggggagcctgctgttttcttatgagtgattcactttgacccgtttcataaagaaggcgctgatcaaaccgatagcggcgacaatcatcgcgaagataaaggcgtgctggacgcccgcaatcagcgcgtgagagtatgcggaaggatcattcgggtttttcacggtgctcatataattcttctgcccggctgccatgatgctgaccgccaccgcagtgccgattgcgccggccatctgctggagcgtattcataatggccgttccgtccgggtaaaattccggcggcagctggtttaagccattcgtttgcgccggcatcatgatcatggaaatgccgatcatcaggcatgtgtggagcacgacgatgagaatggccgttgaagtgccggtaatgtttgagaaaaaccaaagtacggcggccgtgatgacaaacccgggaatgacaagccacttcggtccgtatttgtcaaacaggcgccccgtcaccggagacataaagccgtttaaaataccgcccggcaacaggatgagcccggacgtaaacgccgtcagcatcagtccgctttgtaaatacattggcaatagaagcattgtcgataagataaccatcatacagataaacacaatcacgacaccgagaacaaacatcggatagcggaaagcgcgcagattcatcatcggctgcttcattgtcagctgcctgatggaaaataagatgagcgcgatcgcaccgacagtgagcgaaccgataaccgtcgggcttgaccagccgtctgatccttcgcccgcattgctgaatccgaagacgatgccgccaaacccgatcgtagacagaataatggaaagcacgtcaattttcggttttgtaatgtcagacacgttctgcatgtaggcgatgccgaataaaagagccaacacaagaaacggcagggaaatccagaaaatccaatgccagttcaaatgctctaacacgagccctgaaaatgtcggaccgatcgcaggagcgaacatgatgacaagcccgatcgtccccatcgccgctccgcgcttatgcggcggaaagatgacgaggattgtattaaacatcagcggcagcagcagcccggttcctaaagcctgcacgattctcgccgccaaaagaaacggaaagctcggcgcaagcgctgcaatcagcgtgccgataatggaaaaagcaagtgaaacgataaacagctgtctcgtcgtaaaccattgcaaaagcagacccgataccgggacaagaataccgagaacgagcagatagcccgtcgtcagccactggacggtcgcaggagtgatatgtaactccttcatcaggtcagtcagggcgatattcagcgccgtttcactgaacatgccgataaaccctgccgtcagtaaagaaatcatgatcggcatgactttatattgtttggaaggctgagcgttttccaaaatcattctcctctctttctatacgtacatgtctctcgtattttatgtcttcagcaggttcgggatttgtttagaaatatggaggatcggcattttgtcttttttggctaaggacacaatgatgccgccttctatcatggcatttaaaacagtgctgatttccgccgctttctcatcagaaaaaccggctgatctcaatttgcccgcgaacagattctcccattcctgataagcgctttgacaggcctgctggagcttttcgctctttaaagcagtctcggcagccagtaaaccgacaggaaacccttcaaagttctccggacatgtgaattggcttgataagtcctgtaaaaacgcttgaatgctttccgcaggatcaggatgggcatcaaggctttcttttattttcatacggatataatggctcatttcattgacagcctcaatggcgagctgctctttgccgtccggaaaatgatagtaaagagaacctttcggcgcaccgctttctttaataatctgattcagccccgtgccgtaatacccctgaagctgaaacagcctggttgccgcggcgaggattttttcacgagaatctccatagctcataatgttcccaccttactgatttttgacaaatttaaaatatagtgactggtctattatcttgatttcacatgacggtgtcaaggttttttaacggttattttcttcgggaggttgcctgacaagcgcgttgaccggtgcgaggaaaatcttcataaataaagaaaaggagagaaaagaatgaaaaaacaatttatgcccttcattacatttatcacggctctgctcttcatcgcggccggctgctcccaatctcctcaagcgaaagaaacaccgccccggatggcagccgcagccccagcgaaaaaagacggacttccgaatgttaaaattcttgccaccggcggcacaattgcaggcgctgctccttcaaagacgtccgctacggagtacacggcgggggcaatcggagttgatgccctgattcaggccgttccggagataaaagaggtcgcgcatgtgagcggagaacaggttgtgaatatcggcagccagaatatgaataacgagacactgctgaaacttgcaaaacgggtaaacaagctgctcaagtctgatgatacagacggcattgtcattacacatggaacagacacacttgaggaaaccgcctactttctcaatctgacggtcaaaagtgacaagcccgttgttgtcgccgggtcaatgaggccgtccacggcgatcggagcggacgggccgtccaacttatataacgctgtaaaaacagcggctgcgcctgatgcgaaaggcaaggggacgcttgtcgtattaaatgacagaatcgcttcggcgcgctatgtgacaaaaaccaatacaaccgcggccgacacattcaaatcggaagaaatgggttatatcggaacaattgctgatgacatctattttaataacatcatgacccgaaagcatacgaaggatacagatttcaagatagataaacttgataaactgccgcaggtcgatattatatacggctatcaaaatgacggaagctatctctttgaagctgccgtaaaatcaggggcgcaaggcattatttttgcaggctcgggaaacggctcaatgtctgatgcggcgcaaaaaggcgccgtaaagtcggtcaaaagcgggctggcggtcgtccgctccacaaggacgggaaacggaacggtaacacctaatcgagagtatgaaaaagaccatttgacagcttcaaactctctcaaccctcaaaaagcgcggattcttctgatgcttgcgctgacaaaaacgcatgaccctaagcggattcaaacctatttcaatgagtactaggagaagagaactgggtgttctctccttttttgttatgccgtattaaagcataagcgtgctttcgggaaaggggcgtctttctcatttttccgctctttttttaattgttgaaaacagtaaaaaatacactattttttccttttcttctctaatagaatgaaaactgcaaaaatattacatagcaggaggaaagttcatgaaacatataaaaaacaaaattctagttgtccttacagtttgtatgctgtccgtcatttccgtatttgccttccagccgaccgtatcgaaagcctcctcagggcataaccccgttgtcatggtccacggaatcggcggggcgtcctttaacttcgcgggaatcaaaacatacttggcatcccaaggctggtcaagaaaagagatgtacgccatcgatttcttagacaaaaccggaaacaacagacacaatgcgccgagactgtccaattacgtgaaaaaagtgctcagcgaaacaggtgcgaaaaaagtcgatatcgtcgcgcacagcatgggcggagccaacacgctctattacattaaaaatcttgacggcggagacaaaatcgcaaacgtcgtcacactcggcggagcgaacggccttgtgaccaaccgggcgcttccggggactgatccgaaccaaaagattttatatacatcgatttacagctcagcggacttaatcgtcctgaacccgctgtcacggctgatcggcgggaaaaacgtgcagattcacggtgtcggacacatcggacttttgatgaacagccaagtaaacgggctgattaaagaaggtctgaacggcggcggacaaaatacaaattaacagtttcaaagccccggagaatgagaatatcccggggtctttttttcttccatattcttttttcgccgtaaaccaagccctctgaagttatttttgttaaaataataaagttatatcagaattcggagggtttattgtgggaaaagtgaaaagaaatgccccttgcccatgcggcagcgggaagaaatataaaaaatgctgcggaagcaaagaagctgccattccggcagacatcgcggcaaaagaagcgaaacagattcaggaaagcctaatggagtacgcctttacagcacatagagacggcatatcatcatttattaaccagcacgggttcattacggagctggacagacagacaaaagacatcggagtcttcaacctcggcatctggggaattttcttccgtccgctggcaggcagcaagacgatttttgaagaatatcttcagaaaaaagccggcggcatcaaccgcccgaaaacacgggaaatcgttgaatcatggaaaagcatgacacctgccgttatggtgcttgaagatgtgaaagaaggaatgattcactttgaagatgtgatgacgaaaaaacaattcaaagtggaaatggacgtcagccagcaggatcttccgccggcgggaagcctgattctcggctatccgatccacgaagcggaaaaagcggagttcttcatgcaatttacgatcttccctgtgaagcggaccgaagctctaatcagcaaagtgaaaaaggcggcggccccggctcttgcggaaggaaaatcgcctgagcgctttatgcaggaaaacttcgacattgtgctggccgctcttttaggaacggcggaagagcctgagcaggcagctgaagaaaaacagacagaatgggccaacgacatggagaaggaaacggcagacgccattgaaaaaggcctgagcggggatgaatacccggctgagctggttccggccgtaattgatctgtggaaaacgttctgtgtcaaaaaaacaccgacgatcagaaagcctgaagctttcgcggcggcggtcgaatattacgtaaacagcatttctctgaacggcgcgtccgtttctcaagccaagctggcgaagaagtacggcgtcagcgcctcaacgatttccagccgctataaggaaatcgagggtgctctcacggatgaagccgaacgcttcgccgcagctctgacatcttaatacacagccaaaaaaaccttgaagggcaaacgcttttcaaggttttttctgtagagaggctctcaggcaggataattcttaccgtctatctaatactaaacagagcgataaaaggaagggagcctgagccatggatgagacacgtacgctgggcaggacggatttacgggtaaagcgtatcggttttggcgcaaatgcggtcggaggacataatctgtttccgaatcttaatgatgaaacgggaaaagaactcatccgcacagcattggacggcggcgtcaattttattgatacggcgtttatatacggtttggggcgttccgaagagttaatcggtgaagttgtcgcagagcgcggcgtgcgggacagcctcgtgattgcgtcaaaaggcgcgcataaagaagtcaacggacaaatcgagctggacaacagccgtgaatttctccggagtgaggcggaaaacagcctgaagcggctgaaaacagacgtgattgatttgtattacgtccacttccctgacggcaaaacaccgctctccgaagtggcgggcacgctaaaagaactgaaggacgaagggaaaatcagagcaatcggcgcgtccaatctcagcttccggcaattgcaggagtttaacgccgacggctatttagaggtttttcaatcggaatattcactgattcagcgtgaggcggagcatgatctgctgccttattgtgaaaagaacggcatctcctttattccttatttcccgcttgcttccggcttgctgacgggaaagtttacaaaagacacagtctttgaggacagccgaaagaacaggccgccgtttcagggagaagcttttcaccaaaatctggagcgagtggataagcttcgggccgttgcggaggaaaaaggggcgcagacagcgcatatcgcactcgcatggcttctgtcgcagccggcggtggatgcgatcattcccggagccaaacgccccgtccagctgaaacacaatctggacgcgcttaatgtgcagttaaccgaggatgaggttcaatatatcagtgacatctttaagtgaaaataaaaaaaggaaatagcctgcgctatttcctttcttgttgtcaggacgttttcaaaaacgcttctgtcaatccttccagatcggcgtctgtatccagataccactggccgcgggcgtttttcttcatctcaatttctcttgtaacagaagaagaagccggtttcaggcgtataaactcttccggatagacagaaagcaggtggctgacaatttcgttttcatcagcatcagggtgctttccggcatagtcttgcacgcggtcttgcagctggcccgcaagcggagacatatcaagcggcgtcacttttgcttcaaggacggcttttttgcctgacatggatttggtatgcaccttgagctctgtgttatcccgaagcgctgatgacatggcgtcaataatagcggaaatggcttttgaatccgcctgttcttgtgaaatgcctgcagaagcgataaagctggctttcgccgattcctgatatgcggcggccgtcattttttcatttacaccggtcaggcgggtgaaatctttattgtgcttgccgtacagcatcacatcaatgtatgcggataatgcgtccgctgggtcaggttttgcgttggaggctgtgcctttgactttcagtttataagataaaggcttcgcgtcttttgcctgcggctgatataccaattcataggatttgccttcgtcagccgtgaagtacagattgcccgtcactgtcttacccgcatgaagcgtgccgctctgcatcaagtcttccttatcggccttggctgttttcgcgtcatcctgataaagcgagaagtcgctgcttttgacggtaagcgggtctttgcccgtatttttgacggtgaccgttactttcagcgcggccggatgttcagtatcgtctgaagcggcccatgccgtctcttttattttcactttcgccgtgctgctttcctggccgccgctcgtttcgctgctgcacgcggcggtaaatgccgtgagaagcagaatgaaaaacacggcgctcatttttttgatggacatctggtttaccccctgttgttaatgattaattcgatagtcatgaagacagacaggttaattatactagttttgtataaaagagtcttggtaatcatcaatctttttggaagaaaaggaagtgttatgatgaataaagaagaattgaaacagctggctctccgaatcggaaacgtacctgcccgctacgagagtaatgtggaagaataccgggaagatgaggttctgttttggtgggaagataagaatgatccggaagccggcatcatggtcgaattagaccgggacggaaaactgaaatacttatcccgtccggctttccagactgatctgccggctctttcggaatcggacataaaaaaaacgatgcgggcgtttttagaaacccatcgtcctggggcattggctgagttcgaattggaaaacagcggctccgccaatgatggcgatgtgagatattcctatgttcagatggctgacggtctgccgcttccgctgaccgggttttacatcgacctggctgtgacaggggaagtaaccggcttttcttaccatgggaaggccgatgatctgttaagaccggagacaattgcggacaagcgggaagcgttggctcactttgtcaaacatattgaagcagagctgttgttcaccgtcctgcatcagtccgtctatgtgcagggggatgacaagccccatctcgtctatcaaatcgtgtctccgacgcggccgatatcggccgacctgaaggaagagaatgcagaattagacgaatatgaagagctggaagacgacacgcggccgtatgtcccgatttcacgccctgcacctgaagcggaaaagatgagcatcaatgacatgatcgggctgcacgacggtttttataaagagagggaaagcgaccttggagagggccgtatcggcattgcctggcgtcctgaaaaaacaaaatccgcacgggaagataaaagctttgaaagtctgtttaaagaacggaatgaacacgtattgaaaacaatgcatgataaagaatcgggccggctcaccggggcgatgtcatttataaaggttgaaggcgaaccggtgttttccgaggaagaatgccatcacatggccatccgctttttattcgccatgtttccggaagcggatcagtatttccgggttcaatatgatgagccggatgatgaaggagaaaacgtgggacttacatataaggcttgttcgggcggcgttgatttgcgattcggagagggaagaatctgtgtcagcaaaaagacgagtcttgtcactttttatatgccgccggaaattgatccgaaagagctccaggaaatcgatcccgttccttcattgacaatggaagaggcgaaggacgcgatccgccgggccatcaaagccgagctcgcttgggatcgttgttacgatgacgacagctgcggaaaagtgtacaggctcgtatacaagccggttttcccgcggtttattgaggctcatacaggggaagcgatcacgagtttaataggctgaaggtcatgggcgttcgtcccggggctttcacggggaatgtgacatttgtatgaaaaagtgccgctctgaatacggctcttttccctctttgctaaaaatagacacataaaaggcactttcttccctttaaaaggataaggacgtttttatataataaaaaacagttcttttttatacactcttctgaaaggatgaccccattgctgaaagaacatctgagaaaaaaagcgctggaaatcgggaacataccgccggactatgagcttgaaatagaagattatgatgaaaaacaaaaaacgaaagcctattatatatggaaagatcgtaaccatccggataaaacggtcacgattgagctgggcgacgacggatctttgcttacctattcacgcaacgactgtccgagttcagacatgcagctgtcagacgccgaattaaagctgacggctcttcggtttgcggcgagacaccgcccgctaacttttatgaatttcatctttcaggcgagggaagaacgcaatgggtgcatccgatttatctatacaaaaaaagtgctcggccggccgcttcccgattcaggttttttcgttgatgtaaccaggagcggcttcgtcgtgcagtttatctattacggttataagggtgaagcgcccgttccggaaacattcgtcgatcgggaaaaagtcgtctcgcattacatgagtgtgctgacattcagtctcgtctatgatgtggtcaattttgagaaaataccgcgtctcgtctatgaaccgattctgccggcttacagctatccggccggtgaagatgatatcgtgccggatcagcagctttgcgaagacaggaatgagccggcaaaaccgcttcccgcgtttgaacataaacgggaaatcagcctggatgaattaatggggtttacctcggatatggttcagacgcgccggcgcgatctcggggatgagatcggaacgacatggcggaaagggtcggttccggaacggaaagatttgagtatcgaaagctattttgaaagcagcaacaaaaatacaatgaagatgaaaacggacaaaaagacagggaaaatgacagcctttaaatcttttattgagcatcagggcccggccttttattctgcggaagagtgtgaggccgtcgcgcttcaatttttatacaagctttatccgagagcggacgagttttttaaaatgaacccgctgaaaacggacggaaggggcaggttccgcttccatttttccatatggcatcaggatattccgctgcggttcggcgctgcgagaatacttgtcagtcccgtaacggggcttgtggaagcttacatggcgcctgacattgacccggagcagctggagaagatcaatccggtgccggccgttactcccgaagaagcaaaggccgcttttttatccgatttccatctgcggctggagtggcagcgcgattttacgccgtccggcaatgaaggatataagcttgtgtacaggcctgtctatcctccgtacattgatgcgcaaaagcgaaaaaagaaaaggttttattagccagggatcatttgtaaatgaggataatctttaaagcctctccaatcgcctccccaatcaaaaccgagcgttttggcaatcgatacgacctcaagccaatcgggcgtgccgtttcggtttccgtcgtacgtcatatcccaaatcaggcttccatcctttttttgcagggcgaagtcgatcgcaaggccgtaattgtggtaagattccccgccttttgcgtaggtgacgatatttcctttttttgaacgtccttgacggtacaattcgttttgttcctcaattgatctgaaaccctctgtgataacgacggtgatgccttttttcagagcggccgtctgcaatagctccgcattctgtttcacgagcggatgaagagcgcttggaatggctctgtcttgtaatgccgtctgcggcctcaattctttctgcacataggaaaaacataggtctgcggaaaagaagaggatcaaaagcagtgcaattctgactggtcgtttcatggtgaattctctctttctttaattgattaaaatctttgtttgctcactgccataaatttgctatgataaaatataacataattagtagccggaggaaggaggcaaatctatgaaatccaagattccatctgaagaagtggccgtaaagatgaatgaatggtataagctgatccgcgcgtttgaagccgatcaagctgaagcgctgaagcgggagattcaatatgaactcgaagatatggaagagaaccaggatttattgttgtatttttcattgatggaatttcggcaccgcatcatgctggataaattaaaacccatgaaagacggcgactgccagcctccgttctctgaaatgctcactgagattgagatgaaccagcaaaagctgaccggcttactggaatattatttttactatttcaggggaatgtatgaatttaagcagaaaaacttcatctcagcgatttctcattataagcgggctgaggaaaagcttgaatatgtggaagatgacatagagaaagccgagtttctgtataaaatttctgaggtgtactatcacatcaagcagactttcttttcgatgaattacgcggggcaggcgcttgatatttacaagaaatatgaattatacggaatgagaagggtgcagtgcaaatttatcattgccggaaatctgatggacgcccagcagcataaaaaagcgctggaatacctcgaatgcgccttggagcacgcggagcggcttgatgatcaatatatgattgctgcggcctattataatatcgggcactgtatgtacagtctgggtgacttttgcaaggcggcggaggattttgaacgggcggctgccggatttgaagcacacagcttccggcaggtcatccaggctgttttttcactcacgcatatctactttaaaacggaaaaatacagtgaagccgccgccagctgcgcgcggggcatgagaagcgcggcggagtgggaagatgagatctatatgacgaaattccgtctgattaaagagctttatcagggggaaggcggacaggattcactcaaagagtattttgacattctggaatcaaaagagctgttggctgacacagaggaactgcttcaggacgcggctcatttctttcataaacgggagaactacaaagcggcatcttattttttcagcaggcttgtcggcgtgcaaaaaaggctgcaaatgaacaactacgcataatgaaaaaaagaacgagggagcttcggcttcatcgttctttttatgatctcttttgttttcggccgatcaaaaccgggtacatgctctgtattaacatcagggaggaaatgagacaatgtatcaggatttacagggaaaaacagcaatcgtaacaggttcttcgaaaggaatcggaaaagccattgccgaacgcttcggcaaggagcggatgaatgtggttgtgaactacctcggtgattccgccggagcggaagaagcggcggacatcattgagaaagcgggaggccgagccgtcaccgtaaaagccgatgtatcctcagaagaagggattcaggcgctgtttgatgccgcccaggagcatttcgggggtgtggacgtgatggtcaacaattccggctttaacggggccgaagcgatgccccatgaaatgagcctggaggattggcaaagggtcatcgacgtcaacgtgaccggcacctttttgggggcgaaagcggcactgaaacatatgctcgagcgcggcaaaaaaggaactgtcttaaacatatcgagcgttcatcagcaaatcccgcgtcctgaaaacgtgcagtactcggcatccaaaggcgggatcaaaatgatgacggaaacgatggcgctcaattacgcagacaaaggcatccgggtgaatgccatcgctcccggcacgatcgccacggagtccaataaggatctggaagatgaaacacataaacaggcccagctgaaaaaaattccgatgaacgccttcggaaaaccggaagaagtcgccgcggccgccgcatggatggtgtcggaagaagcgagttacgtaaccggaacgacacttttcgtcgacggaggcatgacgctttatccgtctcagctggacagataaaagagagggggaaaccttctcttttttgtttagggaaggatcataaaggaaatggttctctaaaaaacaggagggccgcaagatgaatgactggtggaaagacgccgttgtctatcaaatctatccgcgaagctttcaagatacgaacggcgacggtataggcgacctgcgggggattatcgcgcgtctcgattatataaaagaacttggcgctgatgtgatatggatctgcccgatttacccgtcgccaaacgtcgataacggctacgatgtgacggatcatcaagcgattatggaatcttacggaacgatggaggactttcacgatctgcttacagaatgccgcagccgcggattaaagcttgtgatggatttcgtcttaaatcatacctccacggagcatccttggttcaaagaggcggaaatgaatccggacagcaaataccgcgattattatatttggcggccgggcaccgcggacggcccgccgaccgattgggtgtcggattacggacaatccgtctggcagtacgaagaacatacgggcgaatattacctgcatatgaacgccgtcaaacaagccgacctgaattgggaaaatcccgaggttcggcaatccgtgtacgagatgatgagattttggctcgataaaggcgtggacggattgcgaatagaccagctccatcttctgtcaaaaaaagaatacttgccgccatatgaagattacatcgcccgccgggccgatccgaagcctttccggccaaacggagcacggatacatgattacttaaaagaaatgacgaaagaggtattttccaaatatgacgtgatgtcggtcggcgaggccggatcagtgacgcctgaggaagggctggtctacacgggaaccgatgagcatgaactgaatatgatttttcattttcagcatatggagcttgatcaaaagccgggccaagagcattgggatgtaaaaccgcttgagctgtccgatttgaagaaagtgctcacagactggcaggaaaaactggaacatcaaggctggaatacgctgtattggtgcaatcatgaccagccccggatcgtatcccgtttcggagacgaaggcacataccgcaaagcatccgccaaaatgcttgccgctctgctttatttcatgaaaggcacgccgtacatttaccagggggaagaaatcggcatgacaaacgctccgtttgacagaatagaggattatcaagatattcagaccatcaatatgtatcataaaagggtatttgaaatgggccggaacagggaagaagtcatggcgtccattatggcgaaaagccgggaccatgcccgtacaccgatgcagtgggacggcagcaagaatgccggatttacggagggcgaaccgtggctcgcggtcaattccaattacaaaaccgtcaatgcggccgaggctcaggatgatcccgattctatattgaacttttacaaaaaactgatccgcctgcgaaaacagtatgctgatatcataaaaggcagctacacgctgctgcttcctgatgacccgcagctgttcgtgtatgaaagacaggcaaacggacaaaaactcatgtccatcagcaacgtatcgaaagaagaagccgctttttattggccggacggttccgaacctgaaagggccgagctgcttctcagcaactatgataatgacagcggcacggaatcccgcatcacattccgcccatacgaaacaagagtttatctgcttgcctgatatgtgataggactcccccgtccatacatggcgggggctttttaggtaaattggatattaatttagaaaaaaatatcttgcaaaacgtaattacttcgttttattatggtataggtaacaaatgaacgagaaagaacgctttggaaatcgtcatcattctgatttacagaacagggggaaacggcttgtttaaaaaatggagcggaatcattgtcattgcggcatgctttttaattgcggcgggctgcggcaattcatcttcaaaaggttcgtcaggttcttcaaaaagcggcaaactgcacgtcgtgacgaccttttatcctatgtacgaattcacgaaacaaattgtcaaagacaaaggcgatgtagacattctcatcccgtcttcggtcgaaccccatgattgggagccgacgccgaaggatatcgccggcattcaaaacgccgatcttttcgtatacaacagcgaatatatggagacatgggttccttcagcggaaaaaagcatgggctctgatcatgcgaagtttgtaaaggcgtcgaaaggaattgacttactcgaaggttcggatgaagaggaagaggaacatggacacggcggtcatgaccacagccacagcatggaccctcacgtgtggctcagcccggttcttgcgcaaaaagaggtcaaaaccattacggcgcagatcgtaaaacaggacccgaagaataaagaatactatgagaaaaatagtaaagaatatattgcaaaactgcaggatcttgataaactataccgtacaacattaaataaagcggcgaaaaaagaattgatcacacagcacgcggcattcagctatctcgccaaagaatacggcttaaaacaagtcgcgattgcaggcctttctcctgaagaagagccgagtgcggccaaactggcggatctcaaaacgtttgccaaaaagcatgatgtgaagatcatctactttgaagaagttgcatcgcctaaagttgcagatacgcttgccggtgaaatcggcgcgaaaacggaagtgctcaatacactggaaggtttaagccaaaaagaacgggataaaggcatcggttatatcgacattatggagaaaaaccttgatgcactgaaagattcgctattggttaaataacatagtgtgcgccgcggggtgcacactatttctatgcgggaaaggaaggtcagcatgaatctcgttacattacaggatatcgtttttggttattcgcatacacccgtgcttgacggcgtgtcgctggaaatcaaaagcggcgaattcgtcggcattacaggaccgaacggcgcgtcaaaatcgacgctgatgaaagtcatgctcggcatgctcagaccttgggaaggaacggccgagatcagtaaaaaaaacgcagccggaaaacgcctgacaatcggctatgttccgcagcagatttcttcatttaacgcaggattcccaagcacggttctggagcttgtgcaatcaggccgttatacgaagggaaaatggtttaaacgattgaacgaaacggatcaccacgaggtggaaaacgcgctgaagatggtggaaatgtgggatttccgccaccggaaaatcggcgatttatccggcggacagaagcagaaaatctgcattgcgagaatgcttgcgagcaatccggatctgctgatgcttgatgagccgacaaccgcggttgattatgaaagcaggcagggtttctacgaatttatgcaccatcaggtgaaaaatcacaaccgcaccgtcgtcatggtgacacacgaacaaaacgaagtacagcagtatctggataaagtcatacggcttgaaaggggggaaaaaggcggatggaaatgtttgacttggaattcatgcgacgagcttttctagcgggaagcatgatcggaattatggcgccgatattaggcgtatatctcgtgctgagaagacaggcgctgatggcggatacgctgtctcatatttcattgtcgggcgtggccatcggtttttttctcagtaccaatattacggcggcgagcatcgttgtcgtcacgatcggagcgatcggcattgaatacatgcggcgggcgtaccgtacatattccgaggtatctatcgcaatcttaatggcggccgggctgtcgtttgcgatgtttctgatcagcctgtcaaaaggcggcgcgtcgatgagcatcgatcaatatttatttggatcgcttgtcacggtcagccagcagcaggtctatattatcggaggcattaccctgctgattctgctttatttcattatattaaacagaccgctctatctgcttacttttgacgaggcgacggcgaagacatcaggcattaacacaaacctgctgtcaatgtcattcagcatcgtgacggggctggcgatttcggtcattattccgattatcggcgtgctgctcgtttccgcgctcctcgtactgcccgcggcttttgcaatccgtatcgccaaagggtttaaatgggtgtttgcggcagccattattatttctcttttcagtgtgttcatggggctgacgtcttcgtaccagctcggaacgcctccggggccgtcaatcactttactgttaatcattctgcttctgctcgggtttatgctgcaggggatttggaatgcgtttaaaaaaggaaaagaacgaaaaaaccgccgttaagcggtgcagcagtctcatctgctgctccgtttgacggctttttttacagaaatatatcagcaagacgctcatatgactctttttttgcttcgaaatcaaagacgttgcacagcaccatcatctcttttgtctgataccgctcggaaagttcaagcagacggcgtttcactgcggcaggagagccgatcaccatccgcttcctgttttcttctatctgtttacgatcctccggcgaatacggataagcctgcgcttcttccacactcggcacgcggctgtcggcgccttttccgacacgaagaagccataaatcctggcttaaggcgagttcttccgctttctcatccgtagccgcgcatatgacgaaaatggcacagagcgaggcgggagcggaaaaatgggcggaggcccggaaatggtcccgatagatctgaaaagctttttccccgcgttccggattaatgaaatggccgaagacatagcccgcaccttgaagagcggcgcgtctggcgctgttttccccgaggccgagcacccaaagctgcggggctgtttcaatcaaaggcgctgtttttattcctgcataagcatggtccgagggaaccgaatctgtcagaaaggatgataaatcctgaagctgcctgttgaactcggtcatgcttttctttaccccgtctgtgagggcgagccggattttcgttgtaccgcccggcgagcgtccgaccccaaggtcaatccggttcgggtgcagcgcctcaagctgacggaaagtttccgcgactttataagggctgtactgcggcagcagcacgccgcctgatccgacacggatggacgttgtggctgcggcggtatgagcgatcataatttccggcgaaacgcttgtgagccctcttgtgccgtgatgctcggcaaaccagtaccgcttatagccccatccttcactgaggcgggcgagctccgctgaacggcggagcgtctcgtgcggcccgtttcctttggatacgggcgcctgatcaagtatgcttaaatcaatcactcgtctgcccctttcctgacatgtattgatacaaggataggaaaaatgttcagtcttcgtcaatttctttgttttctctattctctccggaaagaaggagaatataggaagtaatttttcgccgtttttcgccaaaaattcttatgttttatgaaactttgatataataaaagacgtatatcttaataaacaccgggattcttgtcccggaatttagtaaaaatgcgcacttgcggcgtgcttagcggcacccttacagaataggagtgaatcatatggcgatctctttacaaaaaggacagcggattgatttaacaaaaggaaaagccggtctgtcaaaactgctggtcggactcggctgggaccctgtatcatccgggggctttttcggaaagctgttcggcggaggcggtgccaatatcgactgtgacgcttccgtactgatgcttgaaaatgataaaatgacagacagtaaaaacgtcatctatttcggcaatctgaaaagccgatgcggcggtgtcgtacacacgggtgacaacctgacgggagaaggcgacggcgatgatgaacaaattctcgtcgatttggcgaaagtccccgctcagattaataaacttgtgtttgtcgtcaatatttacgactgcgtcagacgaaaacaggacttcggcatgattcaaaacgcgtttatccgcgtcgttgatcaggctaaccgcgaagaactggtgacttacaatttaagagataactattcaggcagaacgagcctgatcgcggctgaaatctaccgcgaggacggcgagtggaaattcgctgcgataggtgaaggcacaaacgatacgaaaatcggcgatatcgttaaccgatacgcctaaacgaaaaaaaggagagtgcacacatggcaatttcattggcaaaaggacaaaaagtagatttgactaaaacaaatccgggtctttctaaagtcgttgtcggccttggctgggatacaaacaaatacgacggcggacatgattttgatttagattccagcgtctttctattaaatgaagcaggaaaatgcgcgtcgcctgatgatttcattttctataatcagcttgaaggcggaaacggctctgtcgcacattcaggcgacaacctgacaggccagggcgaaggcgatgacgaaagcgtaagagtcaacctgagcgcggtgcccgcggctattgacaaaatttcattcgtcatcacgattcatgaagcggaagcgcgcggccaaaacttcggacaagtttccaacgcgttcgtgcgcattgtcaatgaagaaacaaatgaagagctgatccgctacgatctggctgaagatttctcaattgaaacagccattatcgcaggggagctttacagacataacggcgaatggaaattttccgcgatcggctcaggctaccaaggcggactggcccgtattgcgacagattacggcctgcaaatcggctgaaccatatcaaacacagaagggagagacggcacatggctattcaattggcgaaaggacagcgtgttgatctgacaaaaacgaaccccggccttacaaaagcggtgatcggcttaggctgggatacgaacaagtactccggagggcatgactttgaccttgacgcgtcggcttttcttgtcgatgcccatgacaactgtgtaaatgatcttgattttgttttctacaataaccttgaacacccgagcgggggcgtcatccatacgggagacaaccggacgggcgagggcgagggagacgatgaacaaattatcgtcgacttctcaaaaatacccgcaaatattgaaaagatcggcatcaccgtcacgattcatgatgcggaagcgcgcggccaaaatttcggacaagtttcgaacgcgttcgtgcgcgtcgtcgatgaaaacagccagaatgaactgcttcgtttcgatttaggagaagacttctcgattgaaacggcggttgtcgtttgtgagctttaccgccatggggctgagtggaagtttaacgccatcggcagcgggttttccggcggtctggcatcactttgccggaattacggcttgcaggtgtaagcaggaaattaccgttttactaaataggaggaaaaaacttggattttctacatcatattatgtcgacctacgcttccttttttgattggaaaatgtggggtgaggtgctgactgaccctgtatcatgggggctgatcggttccttggttctgctggaagggctgctgtcggccgacaatgcgttagtgcttgcggtgatggtaaggcatctgcctgaaaaacagcggaagaaagcattaacatacggattgttcggggcatatattttccgttttatctttatcgggatcggaatgctgctcattaagttctggtggatcaaagtgcttggcgcgctgtacctggcttggctcgtcattaagcatttctggatcggagaaggtgatgacgatacggaaggcatgaagaaaaattcatggatggtccgtacgttcggaattttctgggccactgtcgtttcagttgagttaatggatttggccttctctgttgacagcattctggccgcgtttgcggtatcggaaaaagtgtgggtgctcttgatcggcggtatgcttggcattctcatgatgcgtacagtcgcaaaagtattccttgttttaattgataaaatccctgagcttgaaaatacggcttttgtgctgatcgggattatcgccgtgaaaatggcggcgagcgcctttgattatgaaatgccgcacgttgtgttcttcggaatcatcatcgctgcgtttgtggtaacgtttattatccactatttcaacaaacaaaagcaggttcaggagcaaacggctgcatctaaagaagaataaaacaaaaaaggagggagagttcatttccttccttttttgtaccgatcatcatgaagagaaaggaggaaaatgatgaggcaggaagaattggtgatccgaaaggcagagccggaaaacgatgactgggaaacgtttctgctgcggccgctgccggaacgtcccggttacgagcgggaaaacgggctggcgtttacccggcttgccgtccggattttgggcactccttatgatgagacggagtattacaataagcttttcgagctgtcttctcatgaaaacatccatgtgttaagcgagacgctggataagaccatcgcgcctgaaacgtttcaggcgctccagcacatccattcggtcaatcaaaaagagaaagggctttcggtttccaggtttgtcgcgtttctcgatgggggcaggctgcttgccaaacacgctgatccgcttatgcaccgccggctgagaaccgcgtttatgacgcttttggaaacctttgcggaccggcatgaaaacgggctgaatcatcccgatttccggcgtgtgctcttggatgtgtcaaagttttcgctgaaccacctgaatccatggcttgaacaagccgatatagagcgtgagatgccgaaggtggtgtggtatggagacgctaccaaaagccagctctattttctctattatctcatgctgatcggctgtgacgtcctattgtttcatccggctgcggaagatccgttcagcttgattgatccggatgaggaactcagctttgtgataaagctccccgcaacaggcggccttgagccattcccgaaagaaaagccggacagaacgtccacgacggcctaccggtcaacgaaagaaattgagcatgtgctgaaccatgaggaatctatgatgtataagccttggcagttcagggatcataccccgcagtccgtgacattaaaaacgacgtatgatgagttatttctcattgcgaaggagcgggcgtttatccggccgcaatttaaagcggacagggagcgggtggccgttccgaacctttttgcgaaagtgatgggggtttccaaagatacgaaagaatattggaatagactccataccgccgcagactatcaggagacacacatgatccgcagttttccgtttacggaagagctgaaagccaactaccagtatcactacagtcaggttttgaacgaagaaggagcgattgacgcggacaggctgaaaagaagcaacatctggcagtacaagcatctcccgtcaggcgtgcagaacgccatcgccaatgtgatttctgacatgtgcagaaacccagggctgaaggctttgcccggggagcaggcaagggatgccgcaatctatttgttccgccaggcgacgaacctgcccgcttcgctgctgcaattgattcagacgtttgattacgcccaaaccgttccgaaactcgttttatatcatacggaacaaaatggcgaactcacacgttctgacgccgccgctctgttgtttttaaataaattcggcgtcgatatcatcttgtataatccgccggggcatcaagacattgagcattatattgaagaaagccaatttgatgtccattggctggaggacatggtatttcggcaggaatataaggagccgtcactcgtaagaaagctgtttagaaccattacgcaaaagcagggagagtaaataaacatgacagaaaatcaaaatccgcttgttcttgataaaaatgaagagatttctgaacaaaaagcagatgacatcagggtgcagctgcgccaagaccctgaggtgcagcgcatttcacagcagattgacgtgaaaaaccaaatggagctgcttgagtacggaaaagaaccggcagttgaaatctcgaagttctccgaccgcatcttaaatatgatgaaaacaacaagtgtcacggattcaggcacaatgctgacgcagctcggaaaaatcatggaccgttttgacaaaaatgatttcgatgaaccaaaaggatttctcgctaaaatgttcaaacgcggcaacagcatgattgaaaagatttttcaaaagtaccgcaccctgggcggagaaattgaaaaaatccacgtcgaaatttcaaaatacaaagatgaaatggcaaagacgaaccatacgcttgaagagatgtatgaaaacaacattaactactacatggagcttgaaaagtatgtcgttgccgggcagatgaagcttgaggaaatgcaggcgctcattccttcttatgaagaaaaagcggccggcggaaaccagcttgcgcaaatgcagcttgatacgctgcgtgacgggcttcaggcgcttgaggaacgtgtctatgatttagatatggcgcggatggtggcgctgcaaacggcgccgcagatccgcctccttcagcgcggaaatacgaagctcatcgggaaaatcaattccgctttcgtcattacgattccgattttcaaaaacggcatcattcaggctgtcacagtcaaacggcaaaagcttgtggctgattcaatgagcgagctggaccgccgcacgaatgaaatgctgaagcgaaacgctgaaaatatctcaaaccaaagcgtggaaattgcccgtatggcaggccgtccgagcattgacattgagacgattgaaacgtcttggaatacgattgtcagcggtatgcaggaaacgaaacagatcgaggaagagaacagacgtatcagagaagacggagcgaaacggattcaacagcttcaggataatattaaaaacgcagtcttaaagaattaacacaccccgcttgcttacggcaagcgggatttttttgcgaaaaaagataatgacaatctgtaaagacaggtgtaaacttatacggtaatcattttcgatttgaggtgctgcttatgaacaaacaacctgccgtcactccgcgaaaacttctggcgattgccggaatgggctggctgtttgatgcgatggatgtcggaattttatcgtttattatcgccgcgcttcacactgattggaatttaacacccgatcaaatgaaatggatcggaagcgtcaattccatcggtatggcagcgggcgcctttgtattcggaatgctggccgacaggatcggccggaaaaaagtgtttatgatcacgctgttattcttttctgtcggaagcggcatatccgctttcgcaacgggattgacggtttttctcatattgcgttttctgatcggaatggggcttggaggggaactgcctgtcgcctcaacgctcgtgtcagaagcgtccgctcccgaaaagcggggacggatcatcgtgctgcttgagagcttttgggccgcgggctggcttcttgcggcggtgatttcctactttgtcataccgtcattcggctggcaggccgcgctgctcttaacggcgctggccgcattttatgcgctgtacttgcggagaagccttccggaatcaccggcgcatcaggcattgccgcagaaaaaaagcatacgcgggcaggcgggaagtgtctggacgaaaccgtatatccggccgacggtgctgctgtctgtcgtttggttctgcgtcgtcttttcatattacggcatgtttttatggctgccgagcgtgatgctgatgaaaggctacagcatgattgagagcttcgaatacgtccttctgatgacacttgcccagcttcccggatatttctctgcggcgtggctgatcgaaaaagcggggcggaagaccatcttagtcatctatttgctcgggacggcgggcagcgcttatttcttcggtgccgcggattcattggccatgctgctcacagcgggcatgctgctgtccttcttcaatctcggcgcatggggcgtgctttacgcctatacaccggagcagtatcctgcggcgatccgtgcgaccggttccggcacaacggcggccgtcggcagaatcggcggcattttcggtccgcttctcgtcggatcgcttgcagcccggaacgtttcgtttacagtgattttcgccgtcttttgtgcggccatcctgattgccgtcatcaccattattattctcggaaaagaaacgaaacagacagagcttgcgcaatgagcacccttttggggtgctttttttagtgagcggtctgttgacagacctatatttttccttaatattccttatttttaggaggggaaaacttcttttttcaggacaatgtcgcgaaaaaattcttgtttttgtaaaaaaaggataggaaatcagtttgcagcacattcggtggaaacgttctcaagcctgataaaagcccggtttcctttataatttatcctcaataaggaggattagagagtatttagaagcataccagaggaaaataagacacagggatgtttttaaagtaatgatacaaaataaaaagggattatgatgtttgtttgacttattacaaacgtgttacggtattaaagattgcttattatggagggaaaatatgaatttggatgagaaaccaattaagataaaagtcgaaaatgtatctaaggttttcggaaaacagacaaaaaaagccattcagatgctgtccagcggaaaaaacaaaaaagagatcctgaaagctaccggatcaaccgttggtgtcaatcaagcaaactttgatgtatatgatggggagatatttgtcatcatgggtctatcggggagcggtaaatcaactttagttcggctgttaaaccggcttattgaaccgactgccgggaatatttatattgatggtgacatgataacaaatatgtcaaaagaccagctccgggaagtgcgccggaaaaaaatcagcatggtctttcaaaaatttgcactgtttccgcacagaacgattcttgaaaatacggaatacggcctggagcttcaaggcgtcgacaaaaaagagcgtgagcaaaaagcgcttgattcgcttaaacttgtcggtcttgaaggctttgaacaccaattcccagatcagctcagcggaggaatgcagcagcgtgtcggacttgcccgcgcattgacgaatgatcctgacattcttctgatggatgaagctttcagtgcgcttgatccgctgatccgcaaagacatgcaggatgagcttttagaccttcatgactctgtcggcaagacgatcatcttcatcacgcatgatcttgatgaagcattgcgcatcggcgacagaatcgtgctgatgaaagacggtaacatcgttcagatcgggacgcctgaagaaattctgatgagcccgtccaatgaatacgttgagaaattcgttgaggacgttgatttatccaaagttctgacagcgggccacatcatgaagcgcgctgaaaccgtgcggattgacaaagggcctcgtgtagcgctgcagctcatgaagaatctcggtatttcatctatttacgccgttgataaacagaaacagcttctcggcgtcattcacgcggcggatgcgaaaaaagcggtggaatccgacttatcgcttcaggatattttaaatactgaatttacgactgtgcacgaaagcacgtacttgactgaaattttcgatgtcgtgtctgatgcgaatattccgatcgccgtcacggacgataaggaccgcatgaaaggcattgtcgtaaaaggcgcattaatcggcgcgctttcaggaaataacgattatataaatgttgaagattctgctgaacaagctcaggattcttctgttcagggggtgaagtaaatggacagattgcctagaattccgttagcagatatcgttgaccggtttgttgactggcttaccatgacgttcggaggtttctttgacggaatctcaaacggtttggccgctttcgtaaacgcgattgtgagcggtttgggtttcatcccgtctattttattgactgttatttttgcagctctcgcttggtggatcagtacgagaggaattgcactctttacgttaatcggattccttgttattgattatttgggctattggtcgccgatgctgcaaacgttggcgcttgtcgtcacatctgttttgatttccattattatcggggttccgatcggcatatgggcgtctcagaaagaaacggtccgccgcattgttacaccgattctggatttaatgcagaccatgccggctttcgtatatctgctgcctgcgattttcttctttaatatcggggttgtgccaggcgtcgtggcatctgttattttcgcaatgcctccgacgatccgcatgacggttctcggtattaaacaagttccggctgatttgattgaagcgacggaagcattcggttcaacgacgtctcagcgtctgttcaaggttcagcttccgcttgccacaaaaacaattcttgccggtattaaccaaagcatcatgcttgctttatcaatggtcgttatcgcggccatggtcggtgcgccgggtctcggttctgaagtatacagcgccgtgacacagttgaaaaccggtgtcggagtggaagcgggtatcgcgatcgtcatcgtagcgattacactcgaccgtatcacgcaaaacattaaagtgaagaagaagagcagggggaatgcctgatgcttaagaaaatcatcggtgtcggcgttaccgctgcgctggctctttctttggctgcctgcggttcgcagactgatggtaaggcaacggctgcggaccaggtgaataaaaccattatcggtattgatccgggatcggggatcatggccctgacggatgaggccgtgaaggattacggattgaaagactggaatgtcgtcacggcgtcaagtgctgccatgacggcgacattgaagaaatcatatgaccggaaaaagccgatcatcgtaacgggctggacgccgcactggatgttctccagatacaagctgaagttccttgatgatccgaaaaaaacgtacggaactgccgagcagattcatacaattacaagaaccggcttcagtaaggaacagcctaacgcggccaaagttctcagccagttcaaatggacgcaggacgatatgggagaagtcatgattgccgttgaggaaggcgaaaagccggccaaagccgcagctgaatatgtgaaaaaacacaaagaccaagtggctcaatggacaaaaggcgcccataaagttaaaggggataaaatcaacctggcttatgtggcgtgggacagtgaaatcgcaagtacgaatgtaatcggaaaagtatttcaagacctcggctatgacgtgaagctgacgcaagtggaggcgggaccgatgtggactgcgattgcgacaggcagcgcggatgcgtcattgtctgcttggcttccgaatacccataaggcatatgcgtctaaatataaaggcaaatatgaagatgtaggaacgagtctgacaggcgtcaagatgggtctggtcgttcctcagtatatgaaaaacgtcaattcaattgaagatttgaagaaataacgaagaaaagcagccctgtaacgggctgctttttttatgcttcaaacgatttgaggacggcagccgttaatatctcaatgcctgtaaagatggcgcttcggtcaaatgtcatttggggatggtgaagccccggctccagaccgcatcctaggccgagcatcgtcgtttttaagttcggcacctttaacccgtaaaagtgaaaatcctctcctccggttgtcacaagaggttcatccacatgttcttctccgagaatgccgcttatcgcagatgccatgatggcttccgcctctttgtttcgctcggctgccgggaggctgtgttctttttgcagttcgatttttgcgccgaatgcggcagccgccgcctcacaggctctttcggtttcggcggttaatttctccatggcggcattggtttgtgcgcggagatcaaggctgaacgatgcttttcccggaatgatattggaactctcaccgcctgcctgaagctttgtcatcttcacggaatgcgggatgccgggatcaagatgaatgaagctgagtttttggacgagaagagcggcgatttcgatactgttaaggccgagatgcggtctcgcgccgtgggcttcttctccgataatcaggccttctatatgctggcttgagccatgcagaatggacggtgcgcatcggccgtttgccgtttcctgtacggggcgcacgtgcacgccgtataagaaatcaacatcatccagtacgcctttttcaatcattttcagcgctccgccgcctttttcttcagccggctgaaaaataaagcggatggtgcccttcggaagtttcggctgactctttaaaagcatcatcgtgccgagcgccatcgtcatatgtgaatcatgtccgcatgaatggttcgcctgaaagacaccgtccacttcctgccacagcgcgtcaatatccgcccggacagccacaacaggcgagccttctccgatttcgccgacaacaccggtacaatcatcaaacgtgcgggttcggcagccggcctctttcagtttttcagtcagatattcagttgtttgatattctttccagcttacttcgggattagcgtgcaggtggtcaaaaatatccataatgacttgcttttcatgcgctgtgagtctgttcatgccgtaagtcctccttcaaaagctgtctgttttttatttttgatattgaaaacaggcaatcggtctgtatataatatagcacatatctgtattttctgaatagtttataaatttaaagcgggatggtgatgttatggctgtgccgaaggccgaacctgtattgaaaaagaagaaattgtttgtgatgcctgatgcttatgtgctgctgttcattgtcgctttactatgcgcgatagcgtcgtacatcgttcccgcgggggaatttgacagggtgacaaagggcagtgtgacgtccgccgtcccgggaagctatcattctttagaccagtctcctgtcagcccgatcgctttttttaccgcgattcaggaagggatgacaagttccgcgccgattatttttttaatcctgtttacgggcggcaccattgcgattttggagaaaacgggcgccatcaatggattgatcagtaatgtcatcagtacgttccgcacaaaacagctgctgtttattgcgattgtcggatctctattttcgatcctcggcacaaccggcatcgtcgttaattccgtgatcggttttattccgatcggcctgatcgtcgcccgctcgctgaaatgggacgccgtggccggagcggccgtcatttatatcggctgctatgccgggtttaacgcgacgattttatcaccttcaccgctcgggttatcacaaagcattgcggagctgccgctgttttccggtatcggcctgcggattgccgtctacatttgttttctgttatcatctattttatatatttatcggtatacgagaaaactcagaaaagcaaaggacgccagtctgctggggaacgattggtttcctgcggcaggttcactcccgcaggtttctgagccggaggacaagcatgtcccgtttaccgtccgccataaattgattctggctgttgcggctttgtcgcttgccggctttttatacggcgcgcttactcttggctggtctgattcagagatggccgccgtgttcatttttatctcaatcgtgtcaggcctgattgcgggaatggcggcaaatgatatcgcaaaaacgtttattacaggctgtcaggggctcgtttacggtgcgctgatcgtcggaatggcgagaagcatttccgttatcctggaacatggaaagctgcttgatacggtagtcaatggactagcgtcactgctgcacggtttcagcccgatggcaggcgcaatcggaatgtatatttccagcgccctgcttcattttctgatttcatcgggctcaggggaggcggtcgtatttattccgatcttggcgccgcttgccgatctgatgggcatcacgagacaggtcgcggttgaagcggtcatgctcggagaaggcgtcgtaaactgtgtcaatccgacttccggtgtgctgatggccgtactggctgccagcggcattccgtacgtaaagtggcttcgcttcatgattccgctggcgctgatttggtttgtcatcggtctcgtgtttatctgcataggcgtcctgatcaattggggtccttattaacatttttgtcaatgatatttcggtttatcattatgaatcggcaagatataatgggagttgtaagccattcttaatagtacgggaggaagtcatgaatcagcgtcggaacggactttcaaacgtgaatggaaagagtgagagtgtgaaagagaaagaacgaatgatttggtcagaagtcggaatgcttgtgggcacactgtctttgcttgacatcatcgtacgcggacttgttctgaactgtccgtttagggaatgggccggaagcttggcggttttcttcattataattgtttattattgcatcagggcgggggcgtcgggaatgctcatgccgagaatagacaccaaagaagaactgcaaaagcgggtgaagcagcagcggatagattcaattgcggtcacttttgcggtagcggcgattacgatgtacgacagggggtttccccatacattctttgcttggctgaaaatgatctttctttttatcgtctgcggaggcattctgtttctgcttcggtatgtcattgtgaagctgtcttacagaagagcgataaaagaaataaaaaagaaatcatcttgacaggtggtttctttttttgtttgaaagcgggaagtctttttaattgataggaatatagatttgaattcactctgtcacgttgctttgatagagagtgtgtgataagttgaaatgtaagcgttaacagaattctccagtcttcacaacagttgaaaggagctgaagaaagagtaagaggaatttttgactccgcagtcagtcttcaaaaatcaaataaggagtgtcaaaaatgtttgaaaaacgattcaaaacctctttactgccgttattcgccggatttttattgctgtttcatttggttttgtcaggcccggcggctgcaaacgctgaaactgcaaacaaatcgaataaggtgaccgcgtcatcggtcaaaaacgggaccatccttcatgcctggaattggtcgttcaatacgttaacacaaaatatgaaagatattcgtgatgcgggctatgcagccattcagacgtctccgattaaccaagtaaaggaagggaaccaaggagataaaagcatgaggaactggtactggctgtatcagccgacatcgtaccaaatcggaaaccgttacttaggcactgaacaagaatttaaggacatgtgtgcagccgcggaaaaatatggtgtaaaagtcattgttgatgcggttatcaatcatactaccagtgattatggcgcgatttctgacgagattaagcgtattccaaactggacccatggaaacacacaaattaaaaattggtcggatcgatgggacgtcactcaaaattcattgcttgggctgtatgattggaatacacagaatactgaggtgcaggcatatctgaaacgtttcttggaaagagcattgaatgacggagcagacgggttccgctatgatgccgccaagcatatagagcttccggatgatgggaattacggcagccaattttggccgaatatcgcaaatacatcagcggagttccaatacggagaaatcctgcaagacagcgcgtccagagatacagcttatgcgaattatatgaatgtgacggcttctaactacgggcattccatcagatccgctttaaagaaccgtaatctgagtgtgtcgaatatctcccattatgcatctgacgtgtctgcggacaagttagtcacatgggtggaatcacatgatacgtatgccaatgatgatgaagagtccacatggatgagtgatgacgatattcgtttaggctgggcagtgattggttcccgctcaggaagcacgcctcttttcttttccagacctgagggcggaggaaatggtgtaagatttcccggaaaaagtcaaataggagatcgcgggagcgccttatttaaagatcaggcgatcactgcggtcaatacatttcacaatgtaatggccgggcagcctgaggaactctcgaatccgaatgggaacaaccaaatctttatgaatcagcgcggctcaaaaggcgttgtgctggcaaatgcaggatcgtcttctgtcaccatcaatacttcagcgaaattacctgacggcaggtatgataatagggccggcgccggttcatttcaagtagcgaacggcaaactgacaggtacgatcaatgccagatcggcggctgttctttatcctgatgatattggaaatgcgcctcatgtctttcttgagaattaccaaacgggggcagtccattctttcaatgatcagctgacggtcaccctgcgtgcaaatgcgaaaacaacaaaagccgtttaccaaatcaataatgggcagcagacagcatttaaggatggagaccgactaacgatcgggaaaggagatccaatcggcacgacatacaacatcaaattaaccggaacgaacggcgagggtgcagcgaggacccaagaatacacgtttgttaaaaaagacccgtcccaaaccaacatcattggctatcaaaatccggaccattggggccaggtaaatgcttatatttacaaacatgatggaggcagggccatagaattaaccggatcgtggccggggaaagccatgactaagaatgcagatggaatgtacacgctgacgctgcctgagaatgcggatacggccaacgccaaagtgatttttaacaatggcagcgcccaagtgcccggacagaaccagcccggctttgattatgtgcagaatggtttgtataacaactccggtttaaacggttatcttccgcattaatggatagggctatcatcacatcagcgtgccggaaaacccccgcttctgggaaagggacagcgcgtcttcaatcacgctgaaaatgtgacagcatcctaaaacggttccgttttaggatgttgtcaacaatccggaaaccatcaccgatatttttttgtccaaaaatcaaacttttctcttgcaaaagtttgtgaagtgttccacaatataaatgtgaaatacttcacaatataaaaacagacaccacgaaacactggaggatgagcatacatgatgaacgaacgagtgaacaaagtagcattaatcggagcaggttttgttggaagcagttatgcatttgcgttaattaaccaagggatcacagatgagcttgtgatcattgatgtaaatagagaaaaagccatgggagatgtcatggatttaaatcacggaaaggcatttgcgcctcatccggtcaaaacgtcttacggcacatatgaggattgcaaggatgccgatatcgtgtgcatctgtgcaggggccaatcaaaaaccgggcgaaacgagacttgagctggtcgaaaaaaatctcgccatttttaaaagcattgtcggtgaagtaatggcaagcggatttgacggcatcttcctcgttgccacaaacccggtcgacattctcacttatgcgacatggacattcagcgggctgccgaaagaacgcgtcatcggcagcggcacgacactggattctgcgcgattccgttatatgctgagtgaatacttcggagccgctccgcaaaacgtacacgcccacattatcggcgagcacggcgataccgagctccctgtatggagtcacgccaatatcggcggagtgccggtgcagcaattgctggagaaacatgcagcttacaaacaggacgagctggatcagattgttgacgatgtgaaaaacgcggcctaccatattatcgagaaaaaaggtgcgacatattacggagtggcgatgagcctcgcccgcatcacaaaagcgattttgcgtaatgaaaacagcattttaaccgtcagcacatatctggacggccaatacggtgtaaacgacgtctttatcggcgttccggccgtcgtcaatcggaacggcatcgcaggtgtgacggaacttgagctgaatgaaacagaacaggctcaattcagccgcagtgcaaacgtgctgaaagatattctcgctccgcatttcgctgggtgaaacttaaactgaactatccaaatatatgtggtactaataaccccaagggggagacaaaataaaacacctttatgttgtaactagatatatatctaaaagacaacattgaggtgtttttttatggcgaaatgaaaatgctaatcaagtggtatcataacaggaaaaccagcacattcttcagaaaggctttttcaaacataaaagttttgttaaatgagtagtagcatcagttttttccataagtataacgcttgtttttagatgcactctatcaattccttcctccttagacaccagcgttcctcttaataatcaggacagcagcttatatcaatgtgagataaactaaaaaggcagactgttaataagtacctaaagaggaatgcccattgttaatgcccccatagattccttccacggatcattaaaatttagatcaattatccttaaagaaatctgatgaacactgtgaccgcatcgtagagtaacttgccacaattttttggctcaatttgcgttgaataatacgttgtttgcaattactagtgaggtaggagacatatatcgaaacgggctcggaaatctggtagccacaaacatagctgattagggtaatcgtaaaacttattttaaggatagttagagtcagtttgattcctgatcatattcgtatggacattttggtgcaggttagattaccggataatagatttattattattctgtaatataaaaaaagttaaaaaatgaaattgtgaaatagaatatatgcttaaacagagcggtatagatgcaactcttcttaaatatgaatttttttatgatagttaaatttagaatagtaattaatagttgttcttttttttatgaatcaaattaaatgcatattaaataaggtgaggacaatagattcaatataaataggataattttgatataaatcttgactgggataagttcaactgatattttagattataataacatgaaaataattgaaataaatcaaataaagtgtatacatacccattatttccttttttaatttcttggtgtctgtattgtgaagatgaaaaaggtaaacttatacttattcacattctaggaggtgatgtgataaattaatacgattatttattgaacatcacagatttatacataagcacaattaaaaagaagaggagaatatggaaaaaatgatgagccaaaatgtaaaggaaaaagaagattctttagacttaacatctattttagatgaaattgaatcaattgatattatggaagtttcagaatcgatgttgctttctgaaacaggtgcaacaagcggatcaagttcctcaagcagtacatcatgctgcggttcttgttcgtgtgctagctgcggtgcttgtacaagctgcggataagtaaattgtaggggagtgtccaaagtttgaaaaccaaattaaacgagcaaaactcattagacctaacatctattctaaatgagatagaatcaattgatattatggaagtttcagaatcgatgttgctttctgaaacaggtgcaacaagcggatcaagttcctcaagcagtacatcatgctgcggttcttgttcatgtgcgagttgcggtggttgtacaagttgcggataaattaaatgagacaaggacgagatcattctcgtcccagttctctttttcgtgatataaaatttaatgacggggatggagaataagatgaatgcttttccgtggtatatcattagaaagaatcctatatccgttgaagacttttcaggtttccgcgatataagatggataaaacaaatagagaaatttaaaatggaagaatcaagatatgaacaagaaaaacaagataccatcaaaagattggagcaaatgttcaagagagacaaaaaaaacgaaattattaatgtgaaacgaaaagtatacaataataaaatcatcaatcctgatcaatattctgagagtatcttaatggcaacaaaggattatctatttagaaaacaacaattgagagatgctgaaattaagctaactgcattttatgatgaaaagcatttgagcgatcgcaagttaatgcaacgattaatcagtaataatcatgaattgaccaacccactccctcttgtcaacttgaatttcttccataaagtaaataagtttttggagatagatgtaaaggaacacacagcaaatataaggaaggttgattatcagttaagcagaattatatcaagagcggctttgaaaacaagtccttttagttcttttacaagtatagaaataaaaaaattcaatgaaacacatacaaataaacacaaaacaaaggcttatcacacggagatcaatttttttctctttcagaaaatattacatatactttctatggataaagaatatgcaagaaactttcgttataaaatgtcgtccttctatgaaaaaaatgatcatttaatatttattccgcaaatagacttgaaccgaggtaaagtctttaataatgttgagaaagagttctcggtaaaaaataatataatgttcagagatataattcaatcttttcgtaccaacgaaactttgtcttacgaagaattaacgggtattttaaaacattatatggataataagacggttgaatcatttactaatgggctgctgaaaaaaggtttgctgtttgcggatgtacaaactgatgaatattccgaaaatgtgatagaagattttaaaagaaaattagaaaagttaccgaataactccggaaaaacggaaaaaatcataaatattgtacaagaagtgtatcaaaaaacgagggagtatgaaactcaattcatacagaaccgttttaaaataatgagagaactaaaagaaattatctcgaaactggaaagtgtactaagatatcctatagcaagtgaagtaatattttatgaagactatattatcaatggatctaatgattcttttaatatagtgcagaataatttagaagaaataaatatacttcaaaagctagcattaatgattaatattcctattcaagtccaatttgaatttgctgaggtttttaataaggagtattctgatagagaaattccagttaattccctggagctgaaagaaatatttatgagtgtaatcaaaaacttcagaaattggtcagatttacttgccccaatttcaaatttgaagtcaaaaaaagcacttgaaatggaagcgttgaaaaaagaaataaaaaaccattttttatttcagaaatcgagaaaaataaaagaaataaacatagatagacaactaatagaagactggtataaaacattcaaaacaatttttacggaaaaaagaacttattcttctacagctctcatacaaaaaagtggcagttattatgtcttaaataagctgtatgcaggaagtctgagactctttagccgtttttttgaatattttccggagatttatgatgatacggattttagagactacacaggacggatattcccaaaaaatacaatagaaatcagagaaggatacgggtttaatgcgaatcgccatagaaaacttattccaaatcgtttgatacttccgaatagccggggaagcgatgatgatatcaacaaaattccaattgataatttgtactttaaatataataaacagacagagcttgtagagattttttcaggtgttaacaataagaaagtagaaattgaatgtctagggagcttagtggattatatgctcccaaattcagtgcggatgcttttaaattcagttgtccctcgcttagatactgactttgttaatttatgggaacatgaaggttctggggattcttttgtcatagatcatataccatctataagattgggagatatcataatttccagggagaaatggcttgtaaacacagctttctttaaaagaagtttaagtgcagctaaagatgcaaaaaatctctctgaattttttattaagcatggtcttcctatggagtttttcgcgaaaaaatacctaggcgaggaaaattatcaacatgctaccgcaaaaaaaacagatatgaaaccgcaatattttaatttatactctcctatttttattaaggatttcaaaaagtttctagaaagtaacaggatgattataatagaagaaattaaaccgattcctcaaaatagaggttttaataaagaatatcagatagaagttttgctggaggatgaataattggctgattatatagaagtaaaagcatttttctttggaaatgaggccgaaaaagaacaagtatatcttaattttattttaccgtttttttccccgatccttggtcgttttcatgcagagcggggatggaccggaggaccgcactttcgaattatattgtcaaaaagtgatacaagtataattgaaacatttccaagtgaatttaagcgatactgcacaacacattttcctgaattaacacaggtcgagatagaaaacaatttgtccccttatttgactcatcaagatattataccgaatatggaaagaagagaaagcattccaattttgattgagaatcatttaagcgttctaatcggaccctacaatgaagaatatatgtataacacttttaattcttacgctcattttgtagcgcataccagagccctttttatgatgcaagagtttatttctgttaatatttataaattcaaagaaataagcccagaaacacagctcaaaactttgacaagaatgctttatgatgttttagcattttccagttatacggacaaattctctgtgctagtttatgtttcaaatacggaaggcgttttttcaatagctgatagtctaaataaaaaaaggtcatttgaagactcattcttaaaaatgtacaaagctttagaaatccctgcctattttacaaatcaatcatacaatctatctatcggttcaagctggtttgatactgtttcaaaaatcgtagattatacaaaaaaaaatttagatgctttagcagattcagaagatggattttattcgattgaaaaacagaaagaagatttagtaaagaatattgaaagtattgatagcccttttcataagaatctcttaaatcaaattgattcattacttaatcataatgagcataaaatgttcaagtttttaatcaatatcatttataagtcagttcatatgttggggtttacttttgttaagaaaaattttgcttgctttgctgtttccaaatatgtattagataagcatcatacaacatgggaagagattttaaaagaaagagagcgagtataatgatattaaaaacgcgttcgaatttttctatcatgcgtatagatcaatcgattctcataaagaaaataaatggacagcaccaagctgttttgtctgatgaagactataaaactttcattgacatattggcggaataccgtaatccaaagatgttatctttagtcaaccaaaacaatgactatttgaagctgtttaagtttgctctcaagagcggtttgctcatagaagtgaagggaaaaacaaatcaccttacaacgttaattacacagaatattgagaaccgttttgaagattatgaaacaattttggaagatttagatgagagatctatagaattaaaaggtgcaccagaacaggtcatttctttttttatgaataatgggattcttgatgatgaacgtgagcaaaaatccataatttattttaatgataatattagagaagctcccctaaaaagtatatgtatagaaataaatgaaagcgggcgcagttttctgtttaagaaaaaaagtaaggagcaatatgatttcttaaaaagatatgctaatcaatatccaaaagcagatggtgaacttgccagaagaattttaccttttttagtatacgtttatgtcacctctgatctatatgagagtgaacgccaggtgcaagatactttgttacttgaggatggaacaataatttcgattcctgaaaaggatattaccggagtaattgacaattatgagcgaaagttaccgaatgtgaatgatgatgaattaaccattattcaaaaacttgaatctgcttttgtaaactgcccgttgtttaagtgtgagtttaactcaactgagacatccagaataaatcaatttatggcagctcattatcaaattgatattaacaatgattttaaatatatgagtacacatattaattataaaaaagctgcattacatactttaatgcacagcatagaaaaattcttaacttacgaatctgagagaaataaagaaaatactttatggatagcagatcttgataaagatcgtttttatataagagggattgcctcatttataaagaaagaaagctccattcatcttattgaacgaattgatattacagcaaaaaaattgcttcaaacgatttatcatatgactgaaattaaagaagtattaattggaattgactatttgtttaaaaaggatgtcggcattgtttatctcattgatgaagatcattatatcctttataaaagcgaagtaacgacagattttaatgaatcaataatccggggattaacagagatcataagcaacaaggcaaatggtttgcttaaaaaaggtgaatcggttgaattatccagctttcaagtccgagatatcggtcggaaaagaccaaactcactaatattggctgagatgcttgaagttttttccgattatgatattaaagaaaaaccatggatataccaaccactatttgagtccagtaatttattaataggaagttttcaattaaccggggagaatttatcatgatgtactctataaataaagattaccaaaaagttaaaaaagaagatattcatggtaaagttaactattatgaaacttcttcttatgtttttatcggtccgtatgtaaatgatatagaagatccatgctttaactgctttaaagaagcggttaaagcaaatgggagcagatattattggtgcatagagcaggaacgaactgagttaactagctttaacctatttgcggatgatgataaatgtacggaagaattaaggggcgcagtactaatttttaataaaaatacaggaagcattgaaaagaaagaaatttacaaaaatgctttttgtgaaaattgcagttctgatttctttgagaacaaaatactgaaagataatcataatgaaaaattaaataaagagggtagagtcgtttcatttactaatgttattaataagctgaagaagcatgaaaaactcttaattgatcaggatacaggaataggaagaatgctgttcagagatgcagaatcagatgttatccctatgtatggtattgaagcgtatatcggacaaaggcaatatcattcatatggccgggcagagagtctaagtgcctctaagtattccgcaatacttgaaatgattgagcgccatgcgagtatgattccccaattcactaaaccgctgcgtgcttcttatcatcaactgaagcaaaagaaaatggatgtaattaatcctgaatcttttattttgcataaaagtgttgaaggagaacatttatattctcatgataaggaaatttattggacagcgtgccgacgtttagataacaataaagaagttttaattccagagcagttaatttattttgataaccaaatcatacgtggagaaaatcgatttatatatgagacatcaaatggggcagctcttgggaacagtatgaaagaagcagttatgtacggattgtttgaggtaattgaacgagattgttttttggttcattggtattgcaaaaaaacacctaaaagaatagacgtttcatcatcaaataatttacaaatcaaacttgttttaaaacaacttgacgatttgggctatgacgtgcacctttttgatattactctagaaactgatatccccgctgtatgggttcttgcagtaaaccgtaaggatggtgcgaatttaaagtattacaatgcagcaggagctcactacaatccagaaaaagctattttttctggtttagtagaggtagccacatctgctttaatttatgaaaaaaaacttgataaggagaaatcccatttaaattacttaatacaaaatccaagtggcgtaaaaaagatggaggaccatgttaattattattcctttgaagcaaatggcaaagcttttgattttcttctgaataatctggagcaaatggagctaatagaagtgcataaaatgactccagcatttccatttacgtatgatgcacttaaaagagcggtattagataagcaccctgatatttacatagctgatttaactcaatatttaactgaaaaattagattttcacgctgtgaaaattcttatcccaagtttgcaaccgatgacttttggacttcaaaatgagcgtctgaatttggaaagacttaatcaatattgcgaagatctatcgcttttaaaaaataaggaaagagagccgcatccattcccatgagtattactcttaatgaccttacttttaatagatatgaaaagaaccgtaaatctttgtcttttcaatttgtttcaccaagaggcacttcatttaaatatgaaaaggaccagaaaagaaactctcatcaaaataaacctttccgaaaactggccctatttgttgaagagttgtttcgatttcagagttatgaataccaaagtccttactcatttcataaatatgccccctcagctagaggaatctattgtttatacccttatgtcatctgtatgggatatgtatggctttatgatgctctggaccatagatgggtgtgtattggatatgtcccttctaaagttcaagctgtcgagcttatcatctcttgtgatttctggaggttatgctctgtttatggaagttttgggcttgcactaggattgttagaacttggacatatgacagcagatattaaaatggattccgaagatcatggttttcctgttaaaaaggttggctacatgtttaaccgttggcattattcaaaaatactgaaggctcctgaagatattcttcttggatgtctaatagagtttgagcagtcaaagccgattgatcagcctgacgtacgccacaatatttataagtataaaaagacttataactatcaaaaagaacttcttcaaattggcattatggactacataaatgctttgactaaaatggatgaaagtcttaaaaataatgattggttttacgaggagtcttcaaaaggtaataaagctcacagacattcaggtaaccatgtatttggcttactggatattagctctgcttattgtaacaagacttttttagcactcgttttatttttgcaaaatactaaaggaagaatgaataggtctaatcagttttcaatttatattgctgttcagaatatagaagattggaaaaaaggtatttattatataactgaaaacgggtgcaaattaatatcatctgattttgaaataaaaaaattcttttatgatacatacgatttctttgaaatagaaagatctcctttcacactatttgttacatatactggtgatggagaaacaaatcaagaaagtatatattatgcacatgtgggagcagctggccttattcagtatgttgctaggtatatggcagatgggaaggcttatacaaggcccattaaaaatataaatgatttatactgccacgagaaatttaaaaccgaacctaatgaacaggtcatttatgctatgcttttcggttacaacaatacaggtatgaggaaagttgaggggagagatttcgtatgaattggcattcttaccatctgtttattcatgatcaagcatgtcatgatctttttctgaaagagtatttaaaaaagtttttagacaaggaaaagggtttaataagtaaatttttttttataagatattggcaaggagggccgcattttaggtttcggtttcaaagccacaatcctgagaaggtactaagaaaattaaaaattgtatttgctgattttttaaaaaactacaacccttcctataggttaaaaaaggaacaatattatcataatcatacatttgacggagagctgcctgatgaagaggatatgtattgggtggaagatggtcagatagtttctattccttacaagcctgagtacgaaagatacggaggctttgatattatggaggtttctgagacaatttttcatcattcaagccaattagccttgcaggttattgaacaaataaatgatcctaatgtgttaacaaagattatcttggcttgtgatttttttatgttggctgaaagtcagttagcatatagccagcgcaagatattaaatgaaagatatcattcgttttggctgcactttgcaggtgaaagtgaaacacccattgaagagaacctttcaaaaataaaaaatgcatataaagcgagggtaaaaaaaacagccccattagatctcgatatataccatacctttaaaaaagttttagaggaacagattcgacatgctacagccataaaaccagatgtaaatataaatcatttgattttttcacatattcatatgtataacaatcgtattgggttgccaccttattatgaaaatcagattcctgttattatttcatagactggagtgatgtaaaaaatgaaatggaacttcaatcaatcaattacttatgaaaatacactttacagaaaatatcatctgcaatcaaaccatgccccccatattcagatgataaatgccccaagaagggaatatgctattcattccttagacagtgttggtgcaaaagtgaaatataagttaaaaagtatagagaatttgccttctttagaagtggaattatcagaagtgctaaaaaaaagaagatcttcctgggtattttctgaactggatttaacttttgaaatgttagagcagttattgacatatagctttggtattagtaatattagggaaaaaaagcggacatatccctctggtggtcaattttaccccatagaagtctattttgtgccgacagcaagaagtgtagatagcaatttgttagaggagaaagtgtataaatataacatagatcatcaagagattgtggaaatctgcgattttaatattgatgatttaaaagcttttagtgcatctactgatgtgggttttttttctattgatggatgtcaaattgttttatttttggtagctgaagacaaggatatatttgtgaaatatcttgagtttacatatagaattattcatttagatgctgggcatatggctcaaaattttttacttaccagtgctgctcttggactttcaagtattcctataggaggcttttatgaaaaaacagtaaaacaaatactcggtttagataatacgtcaaaaatgattatttatacactcttagggggataatctgtatgtctgagaagctcataaaacttaaagaaaactatcaaatcatacgaaatccgcaaaatccaagtcaagtatttgtttatgataaaaataatgaaatggtttttttgaaatttagcatgagttcattggaaaaattagagaatgtagattttaatcgctgggggcagcattttcaatcacttcaaatattaaaatcctctattgaaggtaatataatcatttcattatataacagatatccagatttgtttatcagtactaataatagcgaagatttaatgattgatgcaaaaatactggagagagaaaacattattaattataatcacttttatagtacatatcaattatccaaccaccaatatgattcatctcgaatttttttgtggggagcttcccaaacaaatctacttgtttttcatcagctcatgaatctctcaatagatgtcacacttattgtatcgttaaaggaaaaattaactccatatgaaaatattctttcaggcagaagtccatttcagcaagtgccggactttataaatagtgtgaaagaccattataacctggaaaacaaaaaagcaaagattttaatttttgaaaaaatatatgattttaaaacattagcaggaaaaaacgtgattcatattgttgacaacaagatactagataaatatgttttgccagagctatttaatagaatcgaatcctcaagaaataaaggtattctatattatggttcttatgaaaatgagttagtgatcggtcccttagtattctcaggtgaaactgtttcttattccgattttctttttaactacgataaagaaacaaaggcgccatcttcagttttaaatttcttatctgcaggaatgattcaacgggttatctcatatcttaatgctgattcactaaagtatctgtctgaagatgctcagcttcccttaaattctgtattttgcattgataagttttctcttaactctaggataatccaattaaagagagaggttttaaaatgaaagttattactcaaggtttgaacaaatcatataaagataaaaaagttctgcaggatattagcttcactattgaaaataacgagattgtggcagtattaggccctaatggggttgggaaaacaaccatgttagaaattttaatgacattgaaaaaatacgattcaggtgatgttcaaatattaggtcataacttaaataaagaatctaatattcaaaaagtgcgttcaaagatcggagttgtttttcaggagggggggatgtatgcatacctaaaaacaaaagaagtgttagacttattcgcctcgttttatgatatatctaatgatagaatcaatgaagttgttaacttattctcgcttacaaaacatatgaatacaaagtatgagaaactatcggggggttggaagaaaagagttttgttagctactgcatttttaaaccagcctgaattactttttctggacgagcctacaacgggacttgatcctaaagcgacaaaagatttatgggatgctattaagttggcgaaaaataacggaacaacaatcttattgtcttctcattctatggaagaagtggatatgtacgcagaccgctctcttattctaaaagatggcaaaattgcagaattcgattctccaacagtgttaagagaaaagtatcaatgtacgtattttaaagaagtgtattttgctattttagaaagggagtcttcacataatgagtaaatctttatttaaattatgtaaatatgattttgttgtttttttacgtgaaccttttttcgctttaccaattcttatactgcctgggattttcttttttgtctttatgtctattttcaaagaacagattggaggagcagaaaactttggtccgtatattccaatttacagcttattaatctcatttctcgtattattttttaatattggtcttcaatatgtaacagaaaaagaaagaggaattcataaacgtttaattatgtcttctattacaatatatcatgtaattcttacatatattattagaggagttcttatctcgttaattggttttattgagatattgcttgttggtaaacttgttttccatactattttgacagatcatatgtttttattcattctaactttcctgattgtaatcggtataaccttgttgtttagtttatctactcataatctctttaaaaattcaaggcaagttcttccttatacaatagtcatgtttcaatatgtattatttggatccggccttatgtttcctatcgagtctgttcctgaatttgttaagtatattgtttatataaacccattttatcacatgaaaaatttgttgttatctgtgtggaattggcaacagataatcaactggcaagggatagcatatttggtattggttattttcgtatgtatatgcttaatctatataaaatcgcgttctaaggaatactaaattaaagaattgtgtattggctgttttagcggcgtaaaatttacactataaaaaagcagaattgtttagaggtattatactccccttaggcaggcagatgttatcctaatctgcctgcctaaggggagtattttcgataactattatctataaattcaaagcccgacaaatttgcttagtggacattattctcaattagaaatgatatacgagtgtctaatatccagttcgtcaatgtcaggaaaatcgatgaaaaaggatagtcataaagcagccatgaacgaatggttgccctatgacaaagggtagttcaacaatttgcttactataagttaaatagcatttcttcccttataaagtttaagtatagaaatgttgattgcataagtatcaggcatttaatgaactcacctataagtgggtaaatactatactattccatctctacttgataggggataattaagtttcactaaacccgatcttcttcgttaattcgcttttttcgccatttcctgagaggtttttactctcgcttttcccataaacaaaatggtaacggccgcaatgacgatcggcgtcagcgcaagcgtaaatacatatgtgatgctttgcgacatggcgtcaataatgcgatccagaatgtgcggcggaatatgagcgcgcgtgccggcctggaaaatctcctgcggatttccgatgttctgcatcgcaccgcccgctcctttcatgccgctgaatgaatctgtgagcttgttagtaaacacattcgtctggatggttccgaaaatcgtcacaccgagcgtcataccgaatgatctcaaaaacgagtttgttgagttggcgcttccgcggtaacgcggctccagatcgttcatggacgcagccggcagcagtgagaagttgaagccgacgccgaatcctgagatcagcatgaataccgtcagcatcgtacgcgccgtatccggtgtcatattggaaagcagcagcattccgataaagaaagcgaccacggaaatcagcattaaagtgcggaatcgcacttttgtctggaaaattccgccgatcatacttccgataacagaaccgatcatcatcggcgtcaaaataaagcccgcgcttgtcgcggtgcttccgtacacagcctgaacgaagatcgggataaacaccgctaaaatgacgaacgtggctccgtaaaggaacgccagaatctgtgccgtagcaaataaacggtttttaaacatccaaaatgagataatcggttcttccgcttttctttccacaataaaaaaggcgataaagaacacggcgaacacagcgaacagaccgatgatctgcacggagttccaatcatacgtttttccgccgagctcaagagcgaacatcagaccgacaatggaaaccaccagcgtgattgcgccggcccagtcgattttctgcttcttgtgttcaagggattctttataataacgaagaatgaaaaacaatgataaaataccgatcggcacgttgatgtaaaacacccagtgccagctgatggagtcggtaatgagcgcgcctaaaagcggcccgagaacgctggacaggccgaaaacggcaccgaacatgcccgacatttttccgcgtttttccggcggaaataaatcaaaaatgatcgtgaaggcgatcggcatcagcgcgcctccgccgattccctgaatgacgcggtaaataatgagctgatccattgtttgggcgattccgcataacgcggatccgattaagaaaagaataagaccgaataaaaagaaacgtttgcgtccgtacatatcggacagttttccgtaaatcggcataccggccataacggctaccatgtatgatgccgtcacccacgcgaacttatcgaaacttccgaggtccgccacgatatttcccatcgcagtggcaacgattgtattatccatagccgacattaaaatgcccagcaaaagaccgatgacgacaaacttcgtcgaggcgtccttcgcggctgtttgttccatgctttttcctcccatacttacttttgatcattaaatttgctatgatcatattagatttgccgaaaattatcttgatcgtcaagataaattgattttatagggaggcctgtcagttgtcaacaagaaataccagaagcgagacggaggaaaccgcgatacagttattccgaaagatggccacaaggacgatcctttttcatcaggcggccgctcaatctctcggtctgtttccgaccgatttaaaatcagctgatatcttaaatgaagcaggcccgatgaccgcaggcgagcttgggaaaaaaaccggtctcagcacaggttcggtaacggcgctcattgaccggctcgaaaaagcgggatatgtcatgaggaaaaaagaccccgaagacaaacgtcgggtgattatcgtgccgctgacagccggaaaggcgaatgtgaagcaattgttcagctccttatcccagtccacgatcagcctttgccggcaatataaagaagaagaactgcggctgatattcgattttttaggaaaagcgacggacatgatggaagacgagcttgagaaattaaaataatatatcatagcacggcccattcatgaataacttgtacaagttgcatgaatgagggggaagccaatgaacatctttttaagctacatcgttctcgggctgtcattgtcagcacctgtcggaccggtcaatgcggcgcaaattgacaaaggcatcaaaaacggcttttggcatgcatggattttcggtcttggcgccatggccgcggacgggctgtatatgattctgatctatttcgggctgtctcaatttttgaccgctccttttgtaaaaacgtttttgtggctcttcggttttttcgtgctgacctatacgggagtcgaaacgttaaaaaatataagggaagccatgaatgtcagaagcggaaaaggaaaaccggctttttacaaaacattcggcgcgggattttttatttctctttccaatccgctgagcattttattctggctcggcatatacggcagcattctcgccaaaaccgctgaatccttcgatgcaaatcagcttttgatttacagctccggcattcttctcggcattttgatctgggatttttgcatggcggtcgctgcgagcactttcagaaatcttcttcatgaaacagcgcttcgctggctgacgggagcggcgggtgtgtctttgatcgttttcggattttatttcggctggcaggggattcaaatgctcatctcataaatagaaggactgtcacccatcgcctgtctccatcataacgtatcctgacgatactggaggtgggctgatggcaagcgagctgtacacaaaaagttgccttgaggaaaagttgttggatctgccaaattggcagagagtcgcttttgagcttctatcagaaaaagtaggtgataaagcggacgcgtttccgtgcattccgggacgtcagggatttttgacagatcagctccggatatcctttgcgggtgatccccgcgaagacggaaccccggaggaagtggggatgctgctgtccgagtacggaaagatctcaaggaataccggaaaatacgcgtcgctgcttgtgatttttgatacgcctgaggatttagctgagcattattccgttgaggcgtatgaagaactgttctggtcttttttaaaccggctgagcggctgcgacccgaatgactggccggaagacataccggaggaccctgaacattataaatgggagttctgctttgacggcgagccgtattttattctgtgcgcgacgcctgcgcatgaagcgagacaaagcagaagcttcccgttttttatgctggcgtttcagccgagatgggttttcgaaggattaaatgattcaaccgcgttcggacgaaacatgagccggctgatcagaaaacgcttagaggcgtatgatgaagcccctcttcatccccgattggggtggtacggaggaaaagacaatttagaatggaagcaatatttcctccgtgatgatgagacgcaagtgtcaaagtgtcccttttcttatttgaagagactgtttaaaccgacgaaataagctatgatccggcagggctgtgtccctgctttttttgtacgatccatgtcacgatcgcaatgacggcgagaaaacaaaggctgaccagaaaaccgggccggctcgatttctcaaacagcgtcccggagacggccgcgacaatcagcacaagggcgataacaatctgaacggttcccatctttgtcgtttcaagcagtttcttgcccgagaacaaaatgaacagccacgtataaagaagcatcaggcccgccgcggttgtcatgtgttcatatatatttttcggcagcaccaatgacaggatgatggagacgatgagtccggcaaacgtcaatcctagcgcaggccagcagatttttttgttttcctttaatctgaagcatttcggcgcatccccgtcatcggccatcgtacaaagcaatgtcgtcacggcaaacagcgaggcgacgagcgtggaaaatcccgcaataataaaaatcccgttaaaaatatcaagaatgagatctaaatgaaaacccttcagcgatgtaataaacgggctgtcctgttcggtgaatttgcccagcggcactaacagcagcgccaggccgagagaaatgacgtaaatcaccgcaagaacggcaagcatcagccggcctgattttgaggcttcctccggctttttcaaatgcacggtcatcagccccaagacttcaattcctccgaaggcgtaaaacgcataaatcagtcccgtccataaacccatcgctccgtgcgggaacaaatcctttgattcgttcggcacctgcacatccggtttatgagaaaatataccgcacaacgccaatatggcgatcacgataaacataaaaatcgccgccgtcttgacaacagcgagcacattttccgttttttgaaaaacggacagccccgtaaatataatcaaaagaccgagcaccgcatagatggaggcgaaaatccacagcggcacattcggaaaccaatgcttcgtaaacagcgagatcgctgtcagctggcttcccgtgatcagcatctcggacgaccagtacacccatccgttgctgaaaccggcccaagtgccgaaagcctttctcgcataagcgcaaaaagaccccttttcgggctgtttggccgaaagcttcgcgagctgctcaaagacaaaataggtgccaagcccggcaataagaaatgagatcagcgcggaatatccgcttttgacaatagcgatgctggacccgagaaaaaagcccgtcccgattgtgcagccgacgccgattaaggagagctgccaccaagcgagatttcctttaggctggtcctgtgatttacccatgaagttcaacccctttatcaaagcttagattgcggccgtcagaaggggaatatacatccaataaattgctttacatgaaacaaacggccgaagttcataatagaagaaaaaaaggagcagtctgatgacacagcaatttattgtaccgccgaaaaaagggctcggcctgaaggttcacaaagggcagattataaaagtagtcgatgtggaaggacagcaggtggctgacttcacggcgtatcatgccaaggacttctatgaacatcttgatcagggcgcgacgattgatgccaaccagtccattcatgtaaaaacgggtgatcatatttattcgaatttatacaagccgatgctgacgctgattgaggatacagtcggcaagcatgacctgctgcttcccgcctgccgtccggatatgaacaggcttttatacggaaagcataaagacgagctccaggatacgtgctatgacaatatgagcggggcgcttgaaccgttcggggtgccgcggccgcatatgcattacccatttgccatctttatgaacacggtgctcgatgagaaggggaacttatcagtcgaaacgcctctttctgacgcgggtgattatgtacggctccgtgcggaaatggatctcgtcgtcgcgttttcatcctgtccgattgaaaaaggaaaatgcaacggagacagcatcacggcgctgcgggtggaaatcagctgatcccggtgtatttgattcacttaaaatctgcacctgtgctatatttaacagagagtcgtacatagtggcatgattcattttcagcatgaacgggaaatggatcataaagaaacaatgcaggaggagtgattgggatgagcatccagaaacaaattatgaatgatctccatgtaaagccctcaattgatccgaaacaagaaattgaggacagagtgaactttctgaaacaatatttgaaaaaaacaggtgccaaaggctttgtgctcggcatcagcggggggcaggattccacgcttgcgggacgcctcgcccaattggcggctgaaagcatcagagaagaaggcggaaacgctgaatttatcgccgtccgtcttccgcacggaacacagcaggatgaggatgacgcccaattggcgctcaaattcattaaacctgataaatcatggacatttgatattaagtccgctgtcagcgcgttcgctgatcagtataaaaaagacacgggcgatcagctgtctgactttaacaaaggaaatgtaaaagccagaatgagaatgatcgctcaatatgccatcggcggacaagaggggctgcttgtcatcggaaccgaccatgcggccgaggcggtgaccggtttcttcacgaaatatggtgacggcggagctgatctgctgccgctgaccggattaacgaaacgccagggcagacgtttattagaagagctcggcgcgccggaacgcctgtatttgaaattaccgacggccgatctgcttgatgaaaaaccgcagcagactgatgagaccgaactcggcatcacatacaatgacattgatgattatttagaaggcaaggacgtttcttccgaagtgattgaggcgctggaaaaacgctacctcagtacagagcataagcgccaggtgccggcatcaatgtttgatgattggtggaaatagaatgaaaaaaacctcccttttaaaagggaggttttttgtttatctcatttttatttatctacactttcataaatccctacccaataccctttgctgctgtcgtagtatttgcttttgaaaatccattttgtcccatctaaaacgaaagaagcagcgaagttgccgttagggctttgaacgagtttgatggcattaatgccggcatctgctttcgttgagattgggctattttccacggatgctgttggtgatgcggcaaaggcaggagcggcagacatcagtaaggcaagagacagcgcagaaccggttaacacttttttgaatttcatttcgagcactcccttttcaaatgaaatgtattacagtgttaataattagattattatccataaaattccttctttatttctaaaatttttttcttaatttgaaaaaacatcccttcagaggggatgttttttatttcttaaagcagtgcctgatctcattcagggattctttcatatgcgcttcagcatgatgaccgaagtattcgagtgatacgaatccgccgtattgcctgttcaacagttctttcagaaagggttcctgctgtaaatcgccttgcagaacagacaccggcttgctgagataccagttgtcaaaattccagtgatagtttttcagatgaatgtggctgacggtatgatacagtttttccaaagcggacatttggtcaacgtgattgacgtgtaggttggagccgtcaaaaatggtgcggacccgcggatgtccgacatcctccaaaaatgccagcgccgcctccggtgtatccgcgtacgtatcgtaatgaatctcaagcccgatatcgacttcatagtcatctgcgagccgtgccgcctgctgaaattgatcaaccgcacgttgccacttttccggtgacgtccggtgcgaaggaagattgccggcaaagactctgatcaagggactgtgcagctgtcgtgccgcgcttgatgccctttgaacatcctttaacgcctgcctttcatcctgagtggcgaagtcagtgtacaaactgacggcaggcaccccgatgccttcctcctgaagctgctgataaagcctgtcgagcgggccgatttcctctatatattgtttagcgtgtccgtaccacagttcgattccctcaaaggagtgctccttcgcgaaagaaatgatgtcgaaaatatgctttttcttaaatcctgtcgtgcaaaaactcagtttcatcggtaatcctcccgtaactgtctatcatatgtgtactttttccccgggtgcgatacggataaacaggtgaaaagggcagacacttttttataagcggggtgtgtctgcatcaggtcagtgcggcacacaaattgtttaacgcttttttgcgtcaaagtattaaataattaaccgaagtgttgtacaattaatttcattcgagtaaggggggagaagccattgaaaaaagaaacggagctgagggccttcagtcccgtccgcaataaaccgactcgcgctcgttatgtgatattggttcttttgttttttatcactgcgattaattatatagaccgagccagtgtatctattgtcggcccatccattcaacattcgctgaacctaagccccgcgcttttgggcatcgttttttctgcgttcagctggacctatacggggatgcagattccaggcgggttcattttggataaattcgggtcaaaacggacatacggaatttctttatttgtgtggtcggtttttaccggagtacaagcttttgcgacaagtttcgggtttctattcggctgccgcctgctcatcggcatagctgaatcgccggcgtttccggcaaacaaccggattgtcacgacatggtttccaaggcgggaacgcgcctttgcgacgggtgtttatacggcgggggaatatgtcgggctggcgtttgccacaccggttttattctgggtgttaacggcatttgactggcgcgccgtatttatttcctcaggggtgctcggaattattttctccattttctggtttaaaatgtatcacgagccgaacgggtatcggaaagtgaatcgtgaggagcttgattatattaaagaaggcggcggactgactgaggtgtctgatgcagccggcaggatatcgtgggcggatttcgtccagcttctaaaataccgcaagcttgtcggattgtatatcggccaattcgccgtagcctccacgctgttcttctttttgacatggtttccgacttatctggcggaggcaaagcacatggctttcttaaaagtcggcttcgccgcatcaattccgtatatcgccgcctttttcggcgtattgttcggcgggtattggtctgacggcatgatgaaacggggggtgtcggtgaacgttgcccggaaaacgcccgtcatcctcggtcttctgctgacaggctccatcgtgctcgcgaatgttacggattctgctcccgcggttttgacgatcttatccattgcttcttttgcgcagggcatgtccaacatatcctggacgatgctgagtgaggtcgcgccaagcgaaacaatcggattggcagggggcgtctttagctttttcgccaatatggccggtattatcaccccgcttatcatcgggtttatcgtttctgcgaccggttcttataacggagcgattctgtttgtcggcgctgtcgcatttatcggggcattttcttatattttcattgtcggaaaggtggaacgcattaagctccgatagaaagaaaaactcatctcttcttataaaggatgggttttctttcattgcattatctctatatttcaatattgagttatcatataataaacataactttttcatttcttaggaggatttcgccgaagatgaacgcaaaacgtgccattcccgtaagagaaagaaatatcgtactgatcggattcatgggtgtcggaaagacaacaatcggccagctggtcgctaagaaactatacagagacttcattgatattgatctgcagattgagaaagatttcaatatgtccatccctgaaatgtttgagaaaaaaggtgaagcctttttccgtcagactgaaaaggactatatattagatatctgccgcaatacgaaattcaagatcgtgtcgcttgggggcggttcgtttaaacaagaggaaatcagacagtgctgccttgaaaactgcctcgtgctccatcttgatttatcatgggagaattggaagcagcgggctgacctgctgattgaaagccgtcccgttctgcataaccgttccatggatgaaatgcagcagctctttaacgagcgccaaagcatctatgataaacataattcaaaagtggcgacggataatctggaaccagaagaaatagccgattatatcgtagaaacgttaaaaatcggctgggacctgtatcagccgatgtaaaaagagccgtgacgctgtgagcgcacggcttttttgtttttaaacaaacgtttattaaaatgtttagaaaatgagtgtaaaatcgtgttaagatagagtcagaaaattaaatcttataaaacaaaggagaataatcggatatgcaattatacgacttgccgctcgaccaactgcaaacctataaaccaaataaaaccgctcctcatgacttttcggatttttgggcatcatcattacatgagcttgcaaaggaagaggcaaagcctgaattgaaggctgaaagctacccggctgacggcgtgaaagtattccggctgacataccgaagcttcggcaaggcggaaattgagggatggtacgccgttcccgaccggcaaggaccgcatccggccatcgtgaaatatcacggctataatgcgagctatgacggggatatacatgacatcgtaaattgggcgcttcacggatatgccgcgttcggcatgcttgtccgcggccagcacagcagcacagatacaagcgtctcaccgcacggacacgttcccggctggatgacgaaagggattttagataaagatacatattattaccgcggcgtgtacttagacgccgtccgggctttggaagtcatcagcggctttgatgaagtggatgaaacgaggatcgccgtcatcggcgggagccagggaggcggactttcaatcgccgcggcggcactatctgacattccgagagcggttgcggccgattatccttatttaagcaattttgagcgggccattgatgtcgctcttgatgagccgtatcttgagattaactcctttttcagaaagaacggcagccccgaaacggagaaggccgcgatgaatacactggcctattttgatatcatgaatctggcggaccgcgtaaaagttccggtgctcatgtccatcgggctgattgaccgcgtgaccccgccgtcgacggtatttgccgcgtacaatcatctggtgacggaaaaagaattgaaggtttaccggtatttcggacatgaatacataccttctttccatacggaaaagctggcctttctgaaagcgcatctgaaaggctgacgacagcgaaaagcccaagtacttgggcttttttcaggaatgatcacggaaaaggacggatacagatgaaacaaaggatcatcgaagaattaaaacgaattgaagcacagcacggcgtcaaggtgctttacgccgtagaatcagggagccgcgcatgggggtttccgtcaagcgacagcgactacgatgtgcggtttctctatgtgccgaaaaaagaatggtacttttcgatcgaaccgcatagggatgtcatagaagagccgatccatgacatgcttgacatcagcggctgggaactgagaaaagcgctgcggctttttaaaaaatcaaatccgcctcttttggaatggctctcttctgagatgatctattatgaagctttctcagcggctgaaaagcttcgaaaactgaaaatccgcgccttttcgcctgaagccggcatctatcattatctcaatatggcaaaacggaatgaaaaaacggaattgcggggcagtgaagtgaagattaaaaagtatttttatgttctgcgtcctctccttgcctgcagttggattgaaacgttcggctccgtaccgccgatgtcatttcccgtactggccgatgccttattgacggatgaagcgctcatttctgaaatcaatacactgcttacaaggaaaaaaagcggtcaggagctggctccggaaccgagaaatacgatcattcatgcatttatagaagaagaaatagaacgcatcgggcactatgtcaaaacgatcaaaatgccgaaacctgacataacggaggaactgaatcggctattgattcagaccgtcgaagaggcgtggggggaaaaaggcggaaattgacgattgccgtcatttccgtccgccttttttcggcataatccgcctgctatctaagaagctgattgtggtaaaaccacaaaaatttatcagaatctttgtatttttagaatattgtgagaggatgttttgtccatttacaatagactcatacaaatacttcttagattgcggggtgttaaggttggaagtgattacaagagattttttcttatttttatccaagagcagctttctcaataagatggcgcgaagctggggaagccgtgtggcagccggcaaaatcatcggaggaatggatttccgcagttctatcccgacaatccgacatttgaacagccaggggctgtcagttactgtcgatcatttgggggaatttgtcaacagcggtgatgtcgcgaaagaacgcaccgaggagtgcatgcagaccatcgccttaatcgctgatgaacagctgaattcccaagtgtcattaaaaatgacgtctttaggtcttgatatagatctcgatctcgtctatgaaaatatgacgaaaatcctccagacggctgaaaaacataaagtcatggtgacgattgacatggaagatgaaacgagatgccagaagacgctggatatctttaaagacttccgaagccggtatgaatatgtaagcaccgtggtgcaggcctatctgtacagaacggagaaggatcttgatgacctcagcccgctgaatccgtttctgcggcttgtcaaaggggcctataaagaatcggaaaaggtggcctatcctgaaaaaagcgacgtcgatgaaaattataaaagactcatccgcaaacagcttttaaaaggacattatacggcagttgccacgcatgatgacaaaatgatcgagtttacaaaacagcttgccaaagagcacggcattccaaacgaccgttttgagtttcagatgctgtacggcatgcgctcgcaaacccagctcagcctggtggaagaaggataccgcatgagagtctacctgccttacggggatgactggtacggctatttcatgagacggctcgctgaacgcccctcaaacatcgcattcgcctttaaaggaatgactaagaagtaaaaaagggagagatgacaatgactacaccttataaacacgaaccattcacgaatttccaagatcaatcgaacgttgaagaatttaagaaagcgcttgcgacggtaaatgagtatctgggaaaagattatccgctcgtcatcaacggtgaaaaggtagagacggaagcgaaaatcgtttcaatcaatccggctgataaagaagaagtcgtcggaaaagtgtcaaaggcgtcccaggagcacgctgagcaagcgattgaagctgctgcgaaagcgttcgaagagtggagatacacatcccctgaagaaagagcggccgttttgttccgcgcagctgccaaagtccgccgcagaaagcacgaattctccgccctgctcgtcaaggaagcgggaaaaccttggaacgaagctgatgcagatacggctgaagcgattgacttcatggagtattatgcacgccaaatgatcgaactggcaaaaggcaaaccggtcaacagccgtgagggcgagaaaaaccaatatgtgtacacgccgactggagtgacagttgttattccgccgtggaacttcttgtttgcgatcatggcaggaacaacagtggcgccgatcgttactggaaacacagtggttctaaaacctgcgagtgctacacctgttattgcagcaaaatttgttgaggtgcttgaagagtccggattgccaaaaggcgtagtcaactttgtgccgggaagcggagcagaagtaggcgattatcttgttgaccatccgaaaacaagccttatcacatttacaggatcacgtgaagtcggtacgagaattttcgaacgcgcggcgaaagtgcagccgggccaacagcatctgaaacgcgtcattgcagaaatgggcggtaaagatacggttgtcgttgacgaagatgcggacattgaattggcggctcaatccatctttacatcagcattcggcttcgcgggacaaaaatgttctgcaggttcacgtgcagttgtccatgaaaaagtgtatgatcaagtattagagcgtgtcattgaaattacggaatcaaaagtaactgctaaacctgacagtgcagatgtttatatggggcctgtcatcgaccaaggttcttacgacaagatcatgagctacattgaaatcggaaaagaagaaggccgtttagtaagcggcggcaccggagatgattcaaaaggctactttatcaagccgacgatcttcgctgaccttgatccgaaagcaagactcatgcaggaagaaattttcgggcctgtcgtggcgttttctaaagtatcaaactttgatgaagcgctggaagtggccaacaatactgaatacggtttgacaggcgcggtcattacaaataaccgcaaacatattgaacgggcgaaacaggaattccatgtcggcaacctgtacttcaaccgcaattgtacgggagcgattgtcggctaccatccgttcggaggcttcaaaatgtccggcactgattcaaaagcgggcggcccggattatttggccctccacatgcaggcgaaaacaatcagtgaaatgttttaagagggactgaatgggcatcctcctcgcggggggtgtccatttcaccataaacatataaagcggaggaggaaatgccatagcaaacattcagttgattatttccatttgtatttatatggcgggtatgctgtttatcggttatttcgcctacagacggacgtcaaatctgacggattacatgctcggggggcgttctttaggccctgccgtcacagcgctcagcgcgggagcggcggatatgagcggatggctcttgatggggcttccgggtgctatgttctcgacaggattaagcggcgcttggattgtgctcgggcttgtgctcggggcgtgggcgaactggcttttcgtggcgccgagactgagaacgtataccgaaaaagcggggaattccatcaccattccgggtttccttgaaaaccgtttcggtgatcatacgaagcttctcagactgttttcgggtcttgtcattctcgtctttttcacattttacgtatcatccggcatggtatccggaggtgtcttattcaacagcattttagggttgaattaccacacgggactgtgggtcgtgacaggcgtcgttgtcgcctacaccttgttcgggggctttttggcggtaagctggacggactttgttcaagggatcattatgtttgtggcgcttattcttgtgccgattgtgacgattttccatacgggcggcccgggggaaaccgttgccgatatccgttccgtcaacccggaactgtttaacatgttcaaagggacgaccgtccttggcattatttctttatttgcgtgggggctcggctatttcgggcagccgcatattattgtgcgctttatggcgatcacgtctgtgaaagaaatcaaacgtgccagacggatcggaatgggatggatgattttgtctgcactaggcgcgctgtttacgggtcttgcgggaatcgcgtattaccaccagaacggactgaagctggctgatccggaaaccatttttattcagctcggcaacattctgttccacccgattattacgggatttctcatttctgcgattttagcggccattatgagtacgatttcgtctcagctgctcgttacgtccagttctttagtggaggacttgtataagtccatgttcaggcgttcagcttctgataaggaactcgtatttctggggagaatggcagtgcttgcggtgtcaatcatcgctttggtgctcgcctgggagaaaaacaacacgatacttggtcttgtcagctatgcatgggcgggattcggcgcttcattcgggccggtcgtactgctcagtttattttggaaacggatgacgaaatggggggcactcgccggcatgattgcgggagcgattaccgtaatcatttgggcgaatgccggtctttcagactttttgtacgaaatcattccgggctttgctgtaagccttgccgctgtatttgtcgtcagcttattgacacaggctccgtcaaaagatgtcacagatcagtttcatgagtaccgtgatacactttctcaataaaagcaaggaacgagaggaagaagggaccgccctttttcctcttttcacgatacagaattccggattatgccgttttgggaatatgtgaatttttttctatacaaaaagtcaccccgcagagtatgataaagataaaaagagcataggagaaataggtatggaagagcttttagagagagttttttcatttacggacattgataaattaattgatttcatcagttatgaattgcagaagcccgttattctggaaagcgcggatttctttttgcttgcctataattcttattacattaatcacttcgactccgccaaccagcagacgatattttcaaaaaaatgccccgtgcagatttttgaaaggtttctgaaggacggggtgatcgaaaagctgaaaaccgttcctgaaccgttccgtgtcgaaaaaatagacagtatcggactgaatcagagagtggttgtaagcgcaaaacataaaggcgaagtgatgggctacatctggattcaggagctcgaccgaaacttgacggacgaggagctcgattttttatatgaaacttcattccatgtcggaaaaatcatctataaaacgaaccggctgaaacaggaaaaagaagagagagcggaagacctggtgaaacgggcgatctttcagcaattctcctctgaaaaggagttcaggcgggaagcggaaaagatgaacgccgtgctgccgtcggttttttcggtagtcgtcctgcacgccgcaaatggggatggggaggcagtcgaagatgtgaaggaaaacatcaaatcgtacttgaatttgcgggataaagtcagtcacgtcttaaccattgattccaatattgtcatcgtcgtcgcaagcttctcgcaaaaaagctccggcacttcggcagcatctgaatttatccacaaactgctgactcattttcactttcagaagatccccactcccatctatatcggaatcggcaatgaatacagcagcatcctgaagcttggcaaaagttatatagaggcccttgaagtcataaaggccgccgaaattaccggaaaccaggaaaatatcccgtacgaatacagtaagctcgggatttaccgctatcttgaaagcatcgaagaaaaaaacgcctcactggaatatgtaaacgaagatttagcgttattaaaagccaaagacagagaaagcagtaccgaactgctgaaaacgttagaaatctatctcctcaataactgcaaaacaaaaccagccgcagaacagctttttattcatcaaaacacattgaactaccgtatcaaacagattcttgacatgacatcaattaatttaaacgacttcaggacaaggtgccagctgtatctcgatatcatgctgatgaaaaagagataaaaaagaaaccagtcgccgtactggtttcagttttaataccttcccgcttatcaatctcagaacctcacttctgaatcactccttttccgcaagagagaaatgaataaacacttctcctcaatatgtgttatactttcattgatattgattctcaattaaaaatgtttgaagtatagatataaacgggaggcagaacgatggcggaaaatcatgaggtgtatgacgtcacgattataggcggaggcccgatcggcctgtttgcggctttttattgcgggatgcgcgagctgaaaacgaaagtgatcgagtttttgccgcggctcggagggaaagtgtctatgtttttccctgaaaaaatcatccgtgatatcggcggaatacccgggattgccggagaacagctgattaagcagctgaaggaacaggctgcgacatttgagccggatatcgtgttgaatcagcgggtgaccggatttgaacggctggaagacggaaccattgtgctggaaagttccaaaggggaaaagcactatacgcgcacggtgattttggccgtcggcatggggacgcttgaggtcaatgaacttgacagcgcggatgcgagccgttattcgggaaagaaccttcattataaggtggagaagcttgatgcgtttcgagataagcatgtcgtgatttccggagggggagataccgcggttgactgggcgaatgagctggaaccgattgcggcgtctgttaccgtcttgcaccgcagggaggagttcggcggtttggaaagcagcgtggcgaaaatgaagcggtcttccgtgcgggtgcttgcgccatatcgtctgaagcatctcaacggcaccggagaacggatcgagagcgtcaccatttgccaaactgagtccggactttctgaagtcatcaagcttgatgagctcattatcaaccacgggtttaaaattgatctcggtccgatgaaggactgggggcttgagatagaagaaggcaggattaaagctgacagacatatgcggacgaatcttccgggcgtgtttgtcgccggtgacgccgcccattatgaaagcaagctcagattgattgcaggcggtttcacggaggggccgaccgccgttaacagcgccaaagcctatttggacccgcaggcggatcagatggcgatgtattcgactcaccataaaaaattggtgacacaataaaaaagggctgacccccgatgttgagtctggggggtcagaaaagcattccggcgtatcagctgtgaacgagcatgtctttcatttcatttcgtataaacgcaaataactgttcctgatttttcacggcggtaaacccgcagccggcggggacgtcttcgcccatgcagatgacgggagggcggtttgctgacggatccggtgatatgccgatttgttttccggcgctgatcaaatgctgagcggattctttgcccgtacagataatcatttgcagaggagactcgctgatcgtgcgttcgatcatggaaatgaaccgctcatctgcgatatgttcatgggtgatataaaacgggcatgattttgagtctgacaagttttctgctgcttgacggcttcctacaatgagtgaatgcggagaatcaatttgacattcggataggacaaagccccgttttgtcagttccgtctttgcggcctcagtcgctgcattcaggcttgcggtcacccggcggatgtcgatctgcttgaaagccagtgtgtcaaagaattcgcataccgcaaggcgtgatgtgaaaaatagttgttcaaaggtgctgatctgtttcaggatattttcgtttgcgggcatttttttaacgatccgcttcggccattcaataacatcggcgccatattcgcgcagcttgtctgtcaatgtatgttcttcatcgccatgagtgacaaccatgatatgctgcccgatgaacggcttgctttcaaaccagctgtgtgtttgaaaattgacaatatcaccaatgacgataatggctgggttggtgatgttttggctttgaactttttcatggatatcctgaagcgttcctttaacgctccgctgccgcccccacgtcccccattgaatgacgagtacgggaacggaaggggattttccgtactccgtaagcttacggcatataaatgacagatttttaacgcccatgtaaaacacaagcgtttgaacgcttcgggcaagcccttcccagtcgagattcggcctgccgtgcaatgatgtatcatgagcggtgatcatcgcgaaggacgaagcgaaatcacgatgagtgacggggactcccgcatacagcggcgctgcgattcccgaggtgatgccgggcaccatttcgtagcggatgccgtgctgatgaagcgcctctgcttcttcgccgactctgccgaacacacttgggtctccgcctttcaagcggactacggtgcagccctccgccgctttttcaatcagcagggcatttatctcagactgtttcataaaatggcggtcgggcagctttccgcaataaatgaaccggcagtccggtgaggcatattcaagaaactttgggtttgcgagccggtcatacaaaataatatccgctttctccagagcctgttttccttttacggtgatcagccccgggtctcctggtccggcaccgacaaaatatacgattccgtttttcatgatggcgtcatcccttcagcagtttaaaaaatgaaggaccacttgaaaaagtgatccggtctttgctcaatacaggaggtatacattctctccttcaatcagtgtttcgtatgttttgacacagccatgatccggctcttggacttttccgtcttctaaggagattttccagtcatgcatcgggcagaagacgtattctccgctgacgatgccttcagccaggacgccccctttatggggacagcgattttcgacggcgcggacgctcccgtcagaaagcttaaatacggcaagctctttatcttctatatatacggtttttcctaactcctcgggtaattcgtttactttgcctatgcaaacctttgtcatatctttattcaccatgtccgttcccccttactgttttatgaagtcgtgacgacattttcgaatagatctttagatgcttttttatctttaaggaagtattgccacggatctttgtggacagagagtgtctcattcattctgtcgttgagctcctgccgtttttccggatcgtttaatacggattggacatgagataaaccgacgcgctcaagccatgcggatgtccgctccagatagtttgccgtttctctgtagtactgaaggtaagcccccgcatattctaagacttcttcattcgtttttactttcatcagcaaatcaccggcgcgcaaatgggttccgccgtttccgccgacataaagctcccagcctccgtcgatgccgacaacgccaaggtccttaatgcctgattccgcacagttccgcgggcaggcggacacggccattttgaccttatgaggcgtattgagcccttcgaattttttctcaagcgcaatgcccagtgccatggagtcttgcgtgccgaagcggcagaattgttcgcctacgcacgtttttaccgtgcggagtgtttttccgtacgcgtagcctgacggcatatcaagctcggcccatactttcggcaggtcttcttttttgacgccgatgagatcaattcgctggccgcctgtcattttaacgagcgggatctcatatttgtcgacgacatcggcgatcttgcggagatcctgagagttggtcacgccgccgtacatccggggcacgactgagtatgttccatctttttgaatattggcgtgcatccgttcgttcacaaaacgggatgttctgtcatcctcgtatgtagccggattaatcatgcctaagtagtagttgagggcaggacggcatttggagcagccctccggcgttttccagccgagcacgttcatgatttctcttgtatgggacagccctttggctttgatttcttctacgacttcatctctcgacagtgatgtgcagccgcaaatcgcttctttttgcgcggacgcgtcaaattctgagcccagtgtatattgaagaatgtcttccacgagcggtttacagcctccgcaggaacgggatgccccggtgcatgctttgatttcgtccgtagatgtgcagcctttttcctgaatggcttgaataatcgcgccttttgaaacgccgttgcatccgcagatgatttcatcgtcgctcatcgccgcggtcatgcttgcgtctgcttcctgatcaagaggctgtaagattgatattttggaagtttcggagatatcggcttctttttgaatcatagaaaacaggcggccgccctcgctgctgtcgccgaacaaaacagcgccgacaatttgattgcccctcaggacgatttttttataaatgccgtcctgctcatcgaacactttaatcgcttttttgtcctctgattcgttaaagtcaccggcagagaagacttcgacgcctgatacctttaattgagtggagagaacggagccttcatacggttttgtttcaatgccgcaaatatgtttggccagcacttttgcctgttcatagagcggcgccacaagaccgtatgcgattccgcggtgctcggcacattcaccgaccgcgtaaatgtgcggaatgtcagtctgcatataatcgttgacaatgattccgcggtttaccggaatgcggctttctgtgccaagctgtgtattcgggcggatgccgaccgccatgacgaccaggtcagcttcgatgcttgtgccgtctttgaagcgtaccccttcgacacggtcagtaccgagaatttcttcggtttgcttttcaaggaaaaaggtcatgccttgtttttctaattcgttttgcagcaggcgtcccgccgctgcgtcaagctggcgctccatcaggaatggggcgaggtggatgacagacacgtccattccgagattcagcagtccgcgtgcggcttccaaacccagcagtcctccgccaatgacggctgcttttttatattgttttgacgcggcgagcatcgtgtctgtatcttttatatcccggaatgccgtgacgccttgtttgtctgcgcccggaatcggaaggataaaagggacagagcctgtcgccaggatgagttcatcgtaaggctggattctgtctgcatcggtgatgacggttttgttttccgtgtcgactttgatgactgtttcaccggtatacagctgaatgttgttttctttgtaccagttccaatcgtttaacgtaatgtcttgaatgtcggtatcgccttgcagcacttttgacagaaggattcggttatagttgggatgaggttcggccccgaatattgtaatctcgaattcgtcttttgaaacacgcagtatttcttcaatcgctcttaccccggccattccatttccaacaaggactagctgtttttttcccatcagatgatccgctccttatctatgttttctttagcgtagcacagcaaaaacaaatatttaaggtgcatgttatgaaatgtaacaaaaaatactaaaaaatctaaaaattttatgaaaaattatatagggctgattcgtaccgcacacatcttaaaaccgggcattttacagtccggatccaaggcttcaccaattaagtcgttgacgttttgcgtgtcagaccaatggatgggaacaaacaacgtgtcttttcgtactttctccgaccatctgctccggaccgtgatgctgccccggggggattctattttcacgagaacacggtcttcgatatgatagtcggccgccgtttttggatggatttccacaaaggattcgaaatgtcttgcagccagggcagagctttttctcgtttggacacccgttaagtaatgagacatcacccttcctgtgattaaataaagcggatagccggcgctcggtttctctttcgggacggccggttcatttggaatcacgcttaattcagctctgtgatcgggatgggcaaatgagtgctcaaacaatcgcccggttccgggatgatccgcttcaggacatggccactgaatgccgccttcccgcctgagcctgtcataggtgatgccagagtaatcagcaattccgccgcggctcgcttctctcagttcgttaaagatttcctccgacgacgtatagggaaaataatgccctttaccaagagccgaggcaatgtcacagatgatctgccaatcatgtttcgcttctccggggcaggtgcggctcgcttctcttaatgtcacgcggccttctacatttgtcatcgtgccttcgtcttccaaataagaggaggcgggtaaaatcacatccgcgaatgccgcggtctcagaaataaataagtcaactgcgacaaagaatctcagtttcttgattgcctgcttgacgaaattcgcatttgggccggaaacagccggattggaacacatgagaaacagtcctttgatgtcgccgctatctattttttctatcatttcataggctgagaccccttttcgcggcagctcttcctgatgaatcccccacaccttcgcaatatacgcccggtgttcttcaatttcgatagaacggtagcccggaagctgatccgctttttggccgtgttctctcgcgccttgtccgttgccttgaccggtaatcgccccgtaacctgagaagggcttgccgatttttcccgtgatcagcaccatatttaagaaagctttcactgccgcggtaccgtcagtctgctgttcgatcccccgcgctgtaaacagcatgccggatgtttccttggcaaacttcacggcggcctttcgtatatgctccaaaggaacacttgtctgctcggagatctcgttcagatccaaagcgtcggtatgctgtttgagcttattgaatccgtttgtgcgtgtgcggataaagtctttgtctgtaagctgttcgtcaatgcagattttgacgagtccgtttgccagggctgcgtctgtgccgggcttgtttttcaggtgaagatcggctattttggtcgtcgccgtttcccggggatcaatggcgataatgtaagccccgttttctttcgctttatcaaaatacggcatgatcgtcggctggcattcggcgatattggtgcctgccaggatgatgacacgtgtatgcgggatgtccgataatggattcgtcaggcccctgtccgcgccgaatgtctggccggccgccgttgctgcggcagacatacagagccgcccgttgtaatcgatgtatttcgtctgtaagccgacccgtgcgaactttccaagcagataggcttcttcatttgtaattgaggcgctcccgtagacggccatcgcatcattgccgtgttcggtttggatcagattgatttgttcctttatgcgattcagcgcttcagcccaagagacaggcacaaattcaccgttttttttaagcagggggcgtgtaatgcgggaagagtgcacggcatgctgatgggcattcatgccttttgtacataaacggccatgtgtcgtcggattatcaatgccgattgcagtgtatttcttccgtgccgcgaaggtttgttccgtaagctgcattttgcattgcatgctgcagaacgggcattgcgtctcatatgttttttccgattggacatcttgcagtttgtcacggaaataacggagcatcggttcagtcaaaaagcttcatcctttcgtatggcgttttcccggcagacaggttttgcagcagggatatgtctgaacagagatttttcagaagctgtgtccgcatatcttcttcaaacagtatttctctgatatggacgaggccgagtctgtcaacccattgataaatcgcttcgttgtagtgagccgtttcgcgataatattgaataaggcctttcatcatagcggcggtactgtcttcgttatccgtcacacaaaaaaggctgccggcgcgggcttgttttccgcggacgcccccgatataaatctcccagccagtttgtgtctgaagcgcgccgatatcctgaatgtaagcatcggtgcaattgttttcacatgacaagctgacggatacataagcgggtacggcaagtgtgtcggtatctcgttcaatcctgcttgccagctcttgaaaggagcgatgctgtccgcacgtacatgctttgatttgaatcgtccagcggtgccggggggagaaaaccggcatgttcagtgcttttctgatgcttgcaaggtcatttggcctgattccggaaagcctcagccggtgactgtcagtcatcgaaacctcggggatgccgtatgcttcgatgacgtttgcgatgtttttgagctctgccgcacttgtcagtccgccgtacatttgcggaatcagggtgcatgtctcttctgccgatatttcattgaactgcataaaatcaggccgcgtcctttccaagtaatagtgaagcgccggaatacaaatgcggcagccgttttctgttttccagccgctctctctcattacctcggcggcatcagtgaacggacggcgccgaatttcggcgatgacttcttcttccgtcaaatcggtgcagccgcaaaacgaaggctggcgggagggttttgtgtaatcatcgctcgccatatacttcagcaagtcttcaacgagcggcctgcatcctccgcaagatccggacgcttttgtcatgtgcttcacttcctccgcggtttttaagccatatttgttcaccgcttcttcaatggagcccttggtcactgagctgcattggcaaatggtttcatggggaggcatggattcaaaggatataccgccctgatccggttccatgagctgttttttcacgatggaaatatctctttgcttcacaagactgtcgagaagccgctgtttaccgcgcgtgtccccgaataaaataaagccggccggtttatcgtcctcaaagagcgcttttttgtagatgcctgcatgctcatcatggaacaatatgccggctgtgtgctcatcctcgtgcacctttcctgccgaccatacatcaataccggctatttttaaggctgcagattgtgcaaagccttgaaacccttcgcacgggacgccgcatagatgctgcgcgagcacttttccctgttcataaagcggcggcgccaatccgtatacaatcccgtcatgctccgcgcattcaccgacggcatacacattcggtttgttcgtctgcatgaattgattgacgatgattcctctgttcactgaaagtccggcagatggagccaatcggatattgggcctcacaccggcggccatgacaatcaggtctgcttctatggaagaactgtctttgaaacgaatgccttccgcccgtgagttccctgtaatggatgccgtgcctttctctaaaagaaagactaagccttttcgttccagctctttctgcagcaggcgggatgccgtttgatcaagctgtttttgcataatggcggaagagtggtgaatgacgctgacgtccatgccgagctgccgtaagccgacggccgcttcaagacctaataaaccggcgccgatgaccgccgccttttgataccggccggccgcattgataagggattggcagtcttctattgtccgaaagccgtacacaccttctttatctgctccgggtatggggagaatataaggagaggagcccgttgcaaggatgatttgatcgtaagtcatgctgcgcttccgatccgttgtgacaacctgccgttctgtatcaatgtgtacaaccgtttctcccgtgtaaagcgtaattccgtttttttcgtaccattcgcggctattcagcgtaatgtcatcaagcgaaacctcaccttgtaaaacggaggataagagaatgcgattgtaattgggatgaggttcgcttccgaaaatgacaatctcaaacatgtcacggttcatctttaaaatgtgttcaatacagcggattccggccattccgttccctgctgcaattaatcgttgtttcttcattcgccaaacctcctttgcagctgcctgtaagattgcttctctatgagaaattatggcacattgcctgattaacgcattaaatgtgtcgcattatcttacacatgtcttttccggtgaatgccggtcatatattcttgattcagcaatttgaaatgatagaagaccggaaaggagaatgttatgaagctgtcggaattaaaaacaagcggtcatccgctcactctgctctgttccttcttatattttgatgtgagttttatgatttgggtaatgctgggggcgctcggcgtttatatttctcaggatttcgggttatcttcttttgaaaaagggtttgtcgtggctctgccgatcttatcaggatctgtgtttcggatcattttaggtgtgttaacggacaggatcgggccgaagaaaacagccgtgatcgggatgctgatcacgatgatcccgctgctttggggggcattcggcggccgttctttgactgagctgtatgcgatcggcattctgctgggcgtagcgggcgcaagttttgctgttgcgcttccgatggcgagccggtggtatccgcctcacttgcaggggcttgcgatggggatagcaggtgccggcaacagcggcactttgtttgcgacattgttcggtccccgccttgcggaacagtttgggtggcacagtgtaatgggaattgcgcttcttccgttgatgatcgtttttatactgtttatcgtcatggcgaaggactctcctgcacagcccgcaccgcagccgcttaaaaactaccttcacgtgttcaggcagaaggaaacatggtgtttctgtcttctgtacggcgtcactttcggaggttttgtgggattatcaagttttttggcgatttttttcgttgatcaatatcaattgtcaaaaatccatgccggtgatttcgtcacaatatgtgtcgcagcgggcagtttttttcgccctgcaggaggctggatttcagaccgggcgggaggtgcgaaagttctggctgtactgtttgtcatcgcggctctgtgtatggcgggagtgagcagcctgcctccgctttcaacggtgatcgttctgctgtttatcggaatgatggcgctcggtatgggcaacggagcggtatttcagcttgtccctcagcgctttgcaaaagaaatcggaatggtgacgggaatcgtcggagcagccggcggcatagggggttttttccttccgaatattttaggatcattgaagcagatgacgggaacttatgcgatcggttttatctctttttcatgtatcgcattgctcgcatttgtgcttgttctggccgcaggctatttttggagaaaaagctatggcactgaaaacagtcctgcggatgtttaagtttgggcggaagacacgtatgacagcgtgtcttttttatgattgattatttttcacttgattttaaacggagaatacatcagaataaatagtaacgattacgatttataataatgtacatcatggtgataataaggcaggtgcggggtataaatcgtaatcattctattttgtcaggaggctattttatgaaaaaaattccggttacagtattgagcggctatcttggtgccggaaagacgaccgttttgaatcatattttacaaaaccgcaacggtttaaaaattgccgtcatcgtcaatgacatgagcgaagtaaatatagacgcgggcttggtgaagcagggaggcggcttgtcaaggacggatgagaaactcgtagaattatccaacggctgtatctgctgcacgctgcgtgaagatttattagtcgaagttgagaaactcgcgaaagacggcagatttgattatatagtgattgaatcaaccgggatcagcgaaccgattcccgttgcccagacattttcttatatagatgaagaaatgggcattgatctgacaacattctgcaggctggacacaatggtgaccatggtggatgcaaaccgcttctggcatgatttccagtccggtgacagccttcttgaccggaaggaagcggcgggagaagaggatgaacgggtgattgccgatttattaattgaccaaatcgagttttgtgatgtgctcattttaaataaatgcgacatggtcggcgaaaaagagcttgaacagctggaaacggttcttcgcgcattacagccccgtgccagactgatccggtccgtccgcggagaagtgcccgccgaatacatattgaataccggtttatttgagtttgaggaagcgagttcatcagcaggatggataaaggagctgacggcaggtcatgaagcgcacactccggaaacggaagagtacggtatcacttcgtttgtgtactcgcggcgtttgccgtttcataccgttcgttttgacagctggctgcatcaatcaatgcctgacagcattgtgcgcgcaaaaggaattgcttggtgcgcaacccgcaacagccttgcgctgctgatgtctcaggcgggtccggcggtttcgattgagcctgtttcttattgggtggcggcaatgccgaaacttgagcaggagcagatcaaacagcaggaaccggagattctggaagattgggacgaccaattcggagaccgtcatacgaacctggtgtttatcggaacagatttagatgaagcagccattacaaaggaattggatcagtgcctgctcacgccgtctgagttcgattccgattggtcgcagcttgaagatccttttcaatgggatattcagcgggccgaataacataccggccaagtttagaagcaggtgaaaagggaaggagtgatgaaaaaggagctgaccaagtgtgaaagcactgacataccaaggaaaagaacatatggaagtgaaagaagtcccggcacccgccattcaagatgagagagatgtcatcgttcgaatcaccgcaaccgggatatgcggttcagaccttcatttatataaaaacggaatacccgccgatccgggttataccgtcgggcatgagccgatgggaatcgttgaagaaacgggcagtcaagtcaaaaagctgaaaaaaggcgaccgggtcgtgattccttttaacatcggctgcggagaatgtcattattgcaagcaccagatggaaagccagtgtgatgaatctaatccaaatcctcatacagatgccggcggcttattcggtttttcggagtttaacggtaattatcccggcgggcaggctgaatatttacgtgttccttatgctgatttctcttcttttctggttccggcagacagtgagcttgaagatgagcaggtgctgcttctgtcagatgtcatgccgaccgccttttggagcgtccagcacagcggagtgaaaaaaggagatacagtcgttattctgggatcaggtccgatcggtttaatggcgcaaaaattcgcgtggaaaaaaggagctaaacgggttatcgcagttgatcaagtcccgcaccgccttgaacatgcgagacgcataaacggagcagagaccttcaatttttcagaacatgatgagatcgggaaactgctgcatgaacatacgtcagggggcgcggatgtagtgattgattgtgtcggaatggacggcacgccgctttcaaaagaaaaagcagagcaaaaaccgaatcagttcggaacgatcagtccgattcttacagcatcagaagccgttaagaagttcggaaccgtgcagctcacgggcgcatacatttctgaagcggacggctttccgctcggtgattttttcacacgcaacgtttctttgaaaatgggccaggcacccgttattcatctgatgccgatgctgtatcaaatgatcgaacaaaatgaaattgatccgacggatatcattacacacaaaatgagtcttgcggaagctcctgctgcatatgatatatttgacaaaaaagaagatggcaacattaaagtgattttaaagccatagcgaggagaaacacgatgaatatttacagaccggcgggattttggatcagattgggagccgtggtactcgactatttaattacttcagtgcctttggcgattatttttatgctggcaacaggaaaagatccgaatgagagcacaatgatcagcatcattttgactctttatgctattttgctccctgtatactggaacggttatgttatcggcaaaaagatctgcggtatccgcatcgtcaaaaaagacggcactcaggtaggctttctcactatgattttgagagtgcttgtgggcggcctgatatatggcgtgacgtttggaatcggcgtgatcgtgagcgcattcatggtcggaatgagagaagacagacggtcaatccacgattttgtagcgggaacgtatgtcacatacgcgctgccggacgaatcgattgaaaagagcgaataatttcgctcttttttttgcataaaaaatggatgagggagcaacatataacaaacgttaaaggaggaaagagtcatgaaaaaagctgcattgtctttagctgcgtttttcattacagcaatggttttcacaatgccggtaaacgccgccggaacaaaaatgccttcaacaatgtcactcacggaacagcagaaaaaagaaattgaatcacttgaaaaagaagtgctcgaaaaacgaaaacatgttatatccaaatatgttgagtacggggtcctgccgaaagaaaaagcagaacatattaaacagcatatggacaggcgctttaacatgatgaaacaaaatgggtttgtcccgaagcctccgcctcataaattggaaaagcggcatcatcattcttaagcatccggcaagccggatgcttttttgtttttatcgggattgctctgaaacgcgtttcataacgtatgatatcaatatcatacgcatcaggaggatgaaacacatgatacataaaaaacagggcctgttccctgatacatttctatgggggtcagcctcggctgcctatcaggttgaaggagcctggaataaagacggtaaaggaccttcagtatgggacttattcacgaaaataccgggtaaaacgtttaaaggctcaaatggcgatacagcagtcggccattatgagcgttataaagaagatatcgccttgatggcagaaatgggtttgaaagcttaccgcttttctgtcagctggccgagaatttttccgaatggcagaggggaaatcaacgaatcagggatcgcattttacgaagacctgatcgatgaattgatttctaacgatattgagccggtgctgactctttatcattgggacttgcctcaggcgctgatggatgaatacggcggctttgaatcaagaaaaattattgatgattttaatgattactgcattgcgttatacaaaagatttgccggcaaggtgaaatactgggtcacgttaaacgagcagaattataattttcataacgggtttattacagctgcacatccgcccggcgtaaaggacagaaaacgattttatgaagcgaatcatatcgcatttttagctaatgccaaagcgattgaatccttcagacaatatgttcctgacggcatgatcggcccgagcttcgcttattcaccggcttatccgcttacaagtcatcctgaagacataactgcatttgaaaacgcagaggaatttatgaatcattggtggcttgatatgtattgccgggggacttatccgcaaattcctttcaattatttaaaggaaaagggctgggcgcccgccattgaagccggggatatggaattgcttgcaaaaggcaagccggattttatcggtgttaattattatcagacgattacgtacgaaagaaatcctcttgacggtgtatcggaggggaaaatgaacacgactggtcagaaagggacaaaccaggataccggtataccgggtctgtttaaaacgaaaaagaattcgaacctcgtgacgagtaattgggattggacgattgacccgataggtctgcgcatcggcctccggcgtataacgagccgctatgagctgccggtttttataacagaaaacgggctgggggaattcgataaaatagaagaagacggctcaattcaggatgactacagaattgactatttacgctcccatcttgaacagtgcagagaggccattagtgacggagttcatctcatcggctactgcagctggtcattcacggatctgttaagctggctgaacggctatcaaaaacgctacggttttgtctatatcaatcgagatgaagaagatgaaaaggatttgaaacggatcaggaaaaaaagtttttattggtaccagaatgtaattgaaacaaacggtaaaagtttataaaagttccctgagagaaataagattctctcagggctttcttttacattgaggctgcatcaataatatacgtatccgcatgaagatcggatatttcggcaggcactgaataacaggtaaggctgtatcggcctttcggaatatgaaagaaaagccgctttgacatcacgctttcaatctcaattccatcttttacagcctcaaagggaacagtcgcttttttctcataggatggtaccggttcacttgtgttaagcctgaggacgataaatgccctcgtatttctccttgcttcaaatgaaacagctccgtcagcttccgcatatcctttttcaatggcttcatcggtccaatcgataacaggcggttctgaatctttttggaagattgtaaattgatgataagaaatggccagttcttgcggtttccatgatttattcaatgcgctgttcctcctgtttttttacttgattttaaataatactctcgttccgtcgggatcattggtaagctggtgtccgacccaagagccggctccgcggttgtctgccggagaaatatattctacggaggcgttatttccgccctgtttacaaaccgccatcggccattcatccctatcgtatcccgttttgacaggcacatgtttaagagattgctcacgccgcttatgtactccgtctctgtcaatggtgcatatgctggaatgtccttcttttatcgcgtccttaatatgctttgctgtttccggatatcgatcggacggaaataagattactttgtcgtaatcactcttctgaacggtctgctcgttatctgagaaaagatcacccttgatcagggccgcgactgctccggcaatgatgataagaacaagcagcagtgcttttaatgttttcaagagtatcaatcacctccagttttaattgctgtaaagctggtccaagaataaagcagaatcggccggctgtaaagctgttaaaatatatttctcagccgcaattcagctgaatatctgtaaaaccatccgcacaaatcaactttattcattaaaaattcgatcagaaagtgttttttgccgtttccctattcagaaatgaatggttgcggccgtatcgtcaattgacttattatagcgataagctcaccggcaggatattttcgttgcgagtgtccgacccgaaaaccttggcctgcatgaccgggcgcaacaagacgataaaaagacggccatctgataagaaggccgtcagcaaatcattccagattcgcatgctttgtaaacatgtctgctgaattcaattcttttttctccatgatttttagaataaccgcatcgtaaaacagcagaagagtttgttcgaataaagaacccatcggctgaatcgtctttctgtctccgccggtctcttccttaggagagccgggaatcgttattgtaagatccgcaagtttgccgagacttgagtcggggttaatcgttaatgcagtgatgatgccgttaaggcttttggctttttcagccgtatgaagcagactttttgtttcgcctgagcctgagccgatgatgacgagaccgccttcttggaggggaggggtaagcgtctcaccgacgatgtaagcgttcagaccgatgtgcatcatcctcatggcgaacgctttagccataaagccggaacgtcccgctccggacgtgaagatttgatctgccgataaaatctgatccgcaagcttgtcagcttcactgtcggatattaatgctgcggtgcgggatatttcatttagtatttcatgtaagtattcagtcgttttcatgatccttgtgtaatcagctgtttcattttagcagcagcatccgctttattgtcagctcccgtaatgcctccgccgacaatgattaaatctgggttttgtttgatggcttcaggaagcgtatcaagtttaatgcctccggcaattgcggttttagcgctcttgaccgcttttttaatcgccgtcagctcctcgaatgaattttttccttctgcttgaagatcataacccgtgtgaacacaaatataatcaacaccgagttggtcaatttcttttgcccgtgtttcaaggttttttacgttaatcatgtcgacgaggatttttttctgctgtttttttgcttcggcaaccgcccctttgatcgttgagtcgtctgtcgctcctaaaacggtgatgatgtcggctcccgcttctgccgctttcataatctcgtaaccgcctgcatccatgattttaagatcggcaagcactttcaagtgaggaaaggctgttttcatttcctgcacggctttcagtccttcattaatgacaacgggagtgccgatttccacaacatctatatatggttcgacctctttcacaagttcaattgcttccgggatattcactaagtctaatgccagctgtaattccactttatatccactcctcttttttatgtattttcattctatagagtgccccgcatgttgagaagtacgcactttgaagtctaatagttactttgaggatactgtccccgcaggcaatgcgctttgtttcagcaaaactgcgtggtagtataaactgatgaaagttgtgtgaaaaagtaagcgtgtatgaatagatgatgaccgtacaaaaagtaagaggaaggagcattgtccgtgagccgaatggatgagaaaacgtttaattgcgaaaaggaattgacgcttgccgtgataggcgggaagtggaaaatgctgattatgtggcacttgggaaaagaagggacgaagcggtttaatgagctgaaagctttaattccggatattacgcacaaaattcttgtgaatcagctcagggagctggagcaggatctgatcgttcacagggaagtttaccctgtcgtccctccgaaagtggagtattctttaacggcgcaaggagaaagccttatgccgattctggacgccatgtataagtggggaaaagattatatggaattaatcaacattgataaaactgcaataaaggaatctttttgaagtgctctatgtaaaatagagtgctttttttgcggtttaatgaaatcatattgcgaacattcggaccgtctgtttcggttcttgcgctgttttttccgggtcagcttacgtacgtaaatttttttcattctgccataactggatattcgacaggttttcattatagtttaaagatttttaattttacgtaaataatatttttgaaaataaattgcgggatgccgcaaaataccctctggatttgtcggaatttttttcggtgtgccgcatgaaacttttcacccatttttcggtgataaaaacaatattttcatataaagtgaacgtaagtagatatatagaaatacatgcagaaataggtaaacctttcgtgcttacaatcaatggctttttgtcttgatttctcataaatttgatgccgcatttcggactgcgcgggtgaacggatgacggatttcggcggtgattgaatcgggatcgtttttggaggtaagtggttcttttggcttgagaatgagttagggacatagagggaggctgtttctaagggagaattgacatctttatcttaaaaaggggaggcgcacacatatggaaataactttttatcctttaacaaatgctcaaaaacgtatctggtatacagaaaaattctatccgaacacaagtatttcaaatcttgccgggttcgggaaactcatttctgaagaccgcgtacaggctcattacgttgagaaagcgatacaggaattcgttcggcggtatgagtcgatgagaatccgtctgcggcttgatgatgagggggagcccgttcaatatgtgagcgaataccgtccgctctctatcgggcacacagatatcaggcaagccggctgctctgcggacgagctgtccaaatgggggcgtgaagaagctggcaagcctctggcgttatatgatcaggatttattccgtttttccgtgcacacgatcagtgaaaatgaggtctggttttacgctaatgtgcatcacattatttcagacgggatttccatgacgattctgggcaatgcgattactgatatttatttggagctttcaggcgggacaagtgaggaacagacggagattccttcttttatcgagcacgtgctgacagagcaggaatatgtgcaatcgaagcggtttaaaaaggatcgggatttttggaacgggcagtttgagaccgtgccggagcttgtgtccctgaaacggagccaggcagatgcgggtcttggtgcgaaacggttttctcaagaaattcctcacgacttatatggccgcattcattcattctgcgaggagcataaagtcagcgtactatctctgttccagtcagctctgatcacttatctctacaaagtgaccggccgggatgacgttgtcacgggtacgtttatgggaaaccggacgaatgcgaaagaaaagcagatgctcgggatgttcgtatctacggtgcctgtgcggacaagcgttgacggaggacagtcgttcttggaattcgttaaaggccggatgaaggatctgatgaaaattctccgccaccaaaagtatccgtataacctgcttgtcaatgatttgcgcgcttcgaaaagttcgctgagcagattgtttacggtggctctggagtaccaggtgatgcagtggcagaaaaaagagaatctgtccttcctgacagaccctattttcagcggaagcggtacaaatgatatttcaattcatgtgaaggaacgatgggacaccgggaaattgacaattgattttgactatcgcagcgacattttcaagggggaagagattgaatctgtttctgaacgtttgatcacgctgatagaagatgcgatttcatctcctgatcgcataattgatgaacttactcttctttctgaatccgagaaagagcggctgttgaaacgggcctccggcaatccggtgaattaccgcggagagatgacgataccggggctgtttgaagagaaagtgaagtcactgtctgacaaacccgcggttgtgtatgaaggccgaacattgtcctatcgcacattgcatgaacagtcaggccgtatcgccggacgccttcttcaagccgggatatcagccgattctcctgtcgcggtgctgcttggccgttctgagcgtgtcattgccgcaatattgggaattttgaaagcgggcggcgcctatgtgccgatagatcctgactttccggcggatcggattcagtacattttggaggacagcggagcgaaggctgttctgacggaggccggaatacaggcgcccgcagcggatgccgaacggattgattttgacgaggctgttcagtatgagacggctgcggacggtgtcagcacacaatcagaccggctggcttacatcatctacacatcaggtacaacggggcggccgaaaggcgtgatgattgagcaccggcaagttcatcatctggtgcaatcactgcagcaggagatttatcaatgcggtgagcagacattaagaatggcgcttttggctccgtttcattttgatgcgtccgtcaaacagatttttgcctcgcttcttttgggacagacgctttatatcgtgccgaaaacgactgtaacgaatggctcggcactgctggactattatcgtcaaaaccggattgaagccactgacggaacgcctgcgcatctgcagatgatggttgcggcgggagatgtcagcggaattgaattgcgccacatgctcattgggggagagggcctgtccgccgctgttgctgaacagctgatggcgctctttcatcaatcgggcaggacgccgcgtctgacgaatgtctacgggccgacagaaacgtgcgtagatgcgtccgtgcatcaggtgtcagcggataacggaatgaatcaacaggcggcgtacgttccgatcggaaaaccgctcggcaacgcccgtctgtatatattggataagcaccagcggcttcagcccgacggcacggccggtgagctgtatatcgcgggtgacggtgtaggccgcggctatttaaatcttccggatttgaccgcagagaagtttttgcaggacccgtttaacggaagcggccgcatgtaccgcacgggtgatatggcgcgttggctgccggacgggacgatcgaatatatcggccgtgaagatgatcaggtgaaagtccgcggctaccgcattgagctgggagaaattgaaacggtgctcagaaaagctccgggcgcggcgcaggccgtcgtgctggcacggccggatcagcagggcagcttagatgtctgcgcatatatcgttcaggaaaaaggaaccgagtttcaccctgccgagtacagggagtatgtgtccaagcaccttcctgattacatggtgcccgcttactttacaaaaacggacgaaattccgctcacgccgagcggaaaggcggaccgcaaaaagctgtttgcgcttgatgtgcaggctgtcagctcatctgaatatgccgcgccgagaaatgaaacggaggaaacacttgccgtcatctggcaggaagttctcggaatggacaaggcgggcatttatgatcatttcttcgagtcaggcggtcattcattaaaggcaatgacgcttctgacgaaaattcataagcaaatgggcgttgaaattccgctgcaatatttgtttgagcatccgacgattgcggcgcttgccgattatgcggaaaaccgaaacgaaggaccggcattcagtgcaattgagccggctgagaagcaggcgagctatccgctttcgctcgctcagcagcggacttatatcgcaagccaatttgaagacgcgggagtcggatataacatgccggctgcggccatgattgagggcgctttagaccgtgaaaagcttgagcgtgcattttctgccttaatcagcaggcatgaagcgctcagaacatcgtttcaatcagaggacggcacgccgagacaagtgattggcgagcatgttccgtttcatattgaaatgatcgaagcgcgcggaagaacgaatgaacaggtcatgaaggactttgtgcgccgttttgatttatctgaggcgccgctgttcagaatcggcctgcaaacgctcggtcacaatcgccatatgctgctgtttgatatgcatcacctgatttctgacggggtgtctatttccatcatgctgaaggaactggctgacatctacggcggaaatcagctgcctgaattgcgcattcaatataaagattatgccgtatggcaggcggaacgggcgaaagcaggctacaagaaggagcgggcgtactggaaagaagtcttcagcggcgaactgccggtgcttcagctgctccctgattatccgcggccgcaggtgcaaagctttgaaggtgaccgcgtgtccgccaagctgccgaaaatgctgcgggaacggctgcagaagcttgccgagaaaaacggagccaccctttacatggtgctgttatcagcatactatacgctgctttctaagtattcgggacaggaagacatcatcgtgggaacaccgtcagcgggaagaaatcactccgataccgaggggcttatcgggatgtttgtcaacacgcttgcgctgcgaagctccgtgaagcaggatcagacatttgccggcttgttaggtcatgtgcgcaagcaggtgctggatgcgttttctcatcaggattatccgtttgagtggctgaccgaggagctgaacgtgccccgggacatgagcaggcatccgatatttgacacgatgttcagtctgcaaaatgcttcggacggaattgcggagatcggtaatctgacgctgtctcttcatgaaacaaacttcaatatcgccaaattcgacctgaccatgcaggctcgggaaacagcggaaggcattgcgcttgatttggattattgcacgaagctgtttaagcgctcaactgcggatcgcatgcttgcgcactatgtccgtctgctggagagcgcggcagctcagccggatgcgaaaatcagcgaatatgatctgctttctgaacgggaggctttgaatcaattacagcggttcaacccggaacgcacggtatacccgaaagatcaaacgatcgtgcagatctttgaagaacaagcccgaaagaaccctgaccggacggctctacagttcgaaggggaaaccctgtcgtatcagcagctgaatgaacgcgccaacaggcttgcgcggcatattctttcggtcggaggcggcggaaaaaccgcggctgttctgtgtgaacggtcaatggatatgattgtttccattatggctgtgttaaaagcggggtccgcctatgtgccgattgatcctgagcatccggttcagcggattcagcatttcttctgcgacagcggggcgaatgtgctcctgactcagcaaagcctcaagccgcttgcggaaaaggccggttttcaaggcgtcattgtgcttgctgatgatgaggcgagctatgaaaaggactctcgcaatccagcattgccgtttgattccaaaacgattgccaatctcacttatacatcaggcacgacgggaacgccgaaaggaaacatcgtcacacatgccaacattttgcggacggtaaaaaacacgaactatttgactgtttctgaagaggacacagtgctcggtctgtcaaactacgtttttgacgcttttatgtttgatatgttcggttcgctgttaaacggtgcaaagcttgtgatcgtcccgaaagatacggtgctggatatgtcacgcctgtcccgtgtgatcaaacgggagaacgtcagcattctgatgattacgacggccctgttccacctgcttgttgatatggagccgtcctgtctgacgacgcttcggaaaatcatgttcgggggcgaaagagcgtctgtagaacatgtcaaaaaggcgcttgcggcagtcggaaaaggaagactgcttcatatgtacggcccgtcggaaagcacggtgtttgcgacataccatccggtggatgtcattgaagaggatacgctctccgttccgatcgggaaaccggtcagcaatacggaagtctttatcatgaactcagccggacgcattcagccggcgggtatcgcgggagagctgtgcgtcagcggggaaggactcgtagaaggctactacaaccgtcctgaactgacggaagaaaaatttgtaaagcatccgtttaaggaaggtgaacggatgtataaaacgggcgacttggccagatggcttccgaatggcgatatcgagtttatcggacgtatcgaccatcaggtgaaaatccgcggtcagcggattgagcttggcgaaattgagcatcagctccaaagtcatgaccagattcaggaatgtattgtgctcgctgtagatcagggtgcgggtgacaaacttctttgcgcgtatgttgtcggcctcagggaaatctcttcccgggagctgagggagcatacggcgaaggatcttccggcttatatgattccgtccgtctttattcaattggatgaactgcctcttacagggaacggaaaaatcgacaggcgggcgctgccgatgccggatgtgaccgcagcgaatgccgtgtcatatacggcgccgcgcaatgaaacagaacaaaaactggcggatatttgggctgaggtgctgcaaatggagcgggtcggcgtccatgaccagttctttgagatcgggggccactcgttagcggggatgaaactgctggcccttatccagaagacattcggcgtgcagcttaccttaaaggatctgttcacttctccgacggctgcggggctggcgcagctgattgaagggactgagcggaaggcggctgagagcatcgcaccggcggccgagcgggaaacgtatccggtttcttcaccgcagaagcggatgttcgtgcttcagcagctggaaggcgctgaaacaagctataacatgccgtctgtgctccgcttaaaaggaaagcttgatgcagaaaagctgaaatccgtcatgaaacagctgacagaacgccatgaagccttcagaacgacatttgacataaaggatggggaaacggttcagcgcatatggacggaagctgatatcgacatggaatattatgaagcctctgaagaagatgctgaacggattattcagagctttatccggccgttccgcctggatcagcttcctctcgtcagaacgggactggtcaagctggctgaacatgaccacctgctgctgtttgacatgcaccatatcatttcggacggcgcttcagtcggcgtgctgatagatgaactgtcccgcttgtatggcggcgaaacgcttgagccgctgcggattcattataaagactatgcggtatggcagcagaaatttattcaatcagagcagtaccgcaagcaggaggagcattggcttcgggagcttgacggcgagcttccggtattgacgctgccggctgattacagccgtccggccgtgcaaacctttgaaggagacaagctggtcttttctctgactgaggaacagacgtcggctcttcgcagtcttgcgaaacaaacggattctaccatgtacatggtgctgctggcgacatacagcgcctttctatcaaaactgagcggacagcatgacatcattgtcggctcgccggttgcgggacggtcacatgcggatctcgcaaacgtcatcggtgtttttgtgaatacactcgcgcttcgtacgtatccggaagcggacaaaacgttcacggactatcttaaagaagtaaaacaaaccgctttacatgcatttgacgcgcaggattatccgcttgaagaccttctgcaaaaggttgaggtgcagcgtgatacgagcagaaatccgctgtttgatgcggtattctcgatgcaaaatgcaaatgcggaagatctggtcatggaaggaattgagctgaagcaccatccgtttgacagaaaaacagccaagtttgacctgacaatgacggctgaggacacagacgaagctttaacgtttgtgcttgaatataacaccgcgctgtttaaaccggaaacggcagagacatggaagcattactggcttcaactgttagaagccgcagcggaaaatccggctgcgaagctttctgagctttcattggtgaataaaacagaaaaacaagctctcctcaacgcatggaagggaaaaacactttctgtgccgcgggacaaaacggttcaccgtctctttgaagatacggccgcccgctacgcgaaccggccggccgcggcatacaacggcgcgaaatggacgtacggcgagctgaacgcaagggcgaaccggatcgcgcgcattctcatggactgcggcgtcacggctgacgaacgtgtcggcattttgacgaaaccgtccttggaaatggccgcgggcgtactcggcgtcctgaaagcaggcgcggcatttgtgccgattgatcccgactacccggaagagcgcatcagctacattctgcaggacagcggcgccaagcttcttctcacacaggaagcgctgggcgtgccggaaagctacaaaggagaaacgattctgcttgacggcggacgctccattctgagcctgccgcttgatgaaaacgatgaagcgaacccgcagacggaaacaacggcggatcatctcgcttatatgatttacacgtcaggaacgaccggacagccgaagggtgtcatggtcgaacaccatgccctggtgaacctgtgcttctggcatcacgacgcattcgccatgacggcggatgataaaagcgccaaatacgcgggcttcggttttgacgcctccatctgggaaatgttcccgacatggaccatcggcgcggagcttcacgtcattgacgaagcgatccggctggatatcacccgcttaaatcactatttcgaagagcacggcgtgaccatcactttcctgccgacgcagctggccgaacaatttatggagctggaaaatacctctctccgcatgcttctcgtcggcggcgacaagctgaagcgggcggtgaaacagccgtacacgatcgtcaacaactacggcccgacggaaaacaccgtcgtcgcgacaagcggcgtcatcaatccggaggaaggatcgctttcgatcggacgggcgattgccaatacgagagtttatattctcggcgacggcgatcaggtgcagccggaaggcattgccggtgaattgtgcgtggccggccgcggtctggcgcgcggatacctgaaccgtgaagaagaaacggcgaagcggtttaccgcagatccgttcgtgcctggcgagcacatgtaccggaccggcgacctcgtcaagtggaacgcgcagtgcggcatcgaatacatcggccgtatcgaccagcaggtcaaagtgcggggctaccggatcgagctttcagaaatcgaagtccgcctcgcccagcttgcggatgttcatgacgcagcggtgacggccgtggaagacaaagcgggcaataccgcgctttgcgcctatgtcgcgcctcagcaggacgatattgaagcgctcaaagccgcgctgaaagacacgctgcctgactacatggtgccggcgttctgggtggagatggacgagcttccggtcaccgcaaacggaaagattgacaaaaaagccctgccggcgcctgacattgaagcgggaagcgccgcgtacaaagcgccggaaacggagatggagacgctgctttccgacatttggcaggaagtgctcggtcttgaccggatcggcgtaagcgataatttcttcacgctcggcggggactcgatcaaaggcatccaaatggcgagccgcctgaaccaacacggctacaagctggagatgaaagatctcttccagcacccgaccatcgaagagctcgtctcgtatgtggagcggacggaaggcaagcaggccgaccaaggccctgtcgaaggcgaagcggacttaacgccgatccagcgctggttctttgaacgaaactttaccgacaaacaccactggaaccaatccgtcatgcttcacgcgaaagacggctttgatccggacctggtggaaaaaaccctgcaagcattgattgaacaccatgatgcgctccgcatggtttactgtgaagaaagggaaggcatcattcagacatacctccctgtcacagaatgcaaggcaagctttgaaatcgttgatctgtacggaactgacgaggatatgctgaaaagccagattcagcggcttgccgatcatcttcagggaagtctggatctggagaacggcccgctgttaaaagcggagcaataccggacagaacaaggcgatcatctgttaatcgcgattcaccatctcgtcgtggacggggtttcatggagaattctgcttgaggatttcgcttcaggttataaacaggcgcagcagcaaaacagcatcgtcctcccgcagaaaacccactcctttaaagattgggcggaggcgctgaacacatttgcgcaatcagaagagctgaaaaagcaggcggcttattgggcgcaggcagatacggaagaactccggccgctgccgaaagaccatgatccgaacaaacggctcgtcaaacatacggcggccgtgaaatgtgaattgactgaggaagaaacggcacagctgctcacagatgttcatcatccgtacggaacggaaatcaacgacattctgctcagcgcgctcggcttaacgatcggtgaatggacggaaaacggcaaagtcggcatcaacttagaaggacacggtcgggaagaaatcataccgaatgtcaatatttcacggacggtcggctggtttacggcccaatatcctttgattctgcagatcagcaaggaagacggcgtctcttccgtcattaaaacggtaaaagagacggtgcggcgagttcctgataaaggcgtcggttacgggattctccggtatctgtcatccgatgaaacagaaaaaggcgccgcgcctgaaatcagttttaactacttggggcagtttgacaatgaagtgaaaacggaatggtttgagccgtctccatatgatatgggacgtcaagtcagcgaagagtcagaggcgttatacgcactgagcttcagcgggatggttacaggcggccgcttcgtcatttcctgctcatacaatcaggaagaatatgaaagaagcaccgtcgaaacacagatgcagcggtttaaagacaatctcttaatgatcatccgccattgcacggccaaagaggagaaagaatttacgccgagcgatttcagcgcgcaggatcttgagatggatgaaatgggagacatctttgacatgcttgaggagaatttaacgtgacaaaaacagataacagaaggggggagcggagcagatgagccaattcagcaaagatcaggttcaggacatgtattatttgtcgccgatgcaggagggaatgctgtttcatactctcctgaatcccggccaaagtttttacatcgaacaaatgacaatgaaagtaaaaggcagcttgaatatcaaaagccttgaagaaagcatgaatgtgatcatggaccggtacgatgtatttcgtaccgtgttcattcacgaaaaagtaaaaaggccggtccaagtcgtattgaaaaaacggcagtttcagatagaagaaatcgatctgacacatgtaacggacagcgagcaaacagccaaaatcaatgaatacaaagaacaggataagatcaagggctttgatttgacgcgggatattccgatgcgggcagccatttttaaaaaatcggaagaaagctttgaatgggtgtggagctaccaccacatcattttggacggctggtgcttcggcatcgtcgtgcaggatctgtttaaggtatacaatgccctgcgtgaacaaaagccgtacagcctgccgccggtcaaaccgtataaagactatatcaagtggcttgaaaagcaggataaacaagcatcactgcattactggcgcgggtacttagaaggttttgaaggacaaacgacatttgcggagcaaaaaaagaaacaaaaggacggctatgagccgaaagagctgctcttctcactgccggaggcggaaacaaaagcatttaccgagcttgcaaaatcgcagcataccactttgagtacggcgctgcaggcggtttggagtgtattaatcagccgctatcagcagtccggcgatttgatcttcggcacagtcgtttccgggcgtcccgcagaaatcaaaggcgttgaacatatggtcgggctgtttatcaatgctgtcccgaggcgggtgaagctgtctgaggataccacatttaacggcttgctcaagcagctgcaggagcaatcgctgcagtctgagccgcatcaatatgtaccgctctatgacatccaaagccaggccgatcagccaaagctgattgaccacatcattgtgtttgaaaattatccgcttcaggatgcaaaaaatgaagagaacagtgaaaacggctttgatatggaggatgtacacgtttttgagaaatcgaattatgatctcaacctgatggcttctccaggtgatgagatgctgattaagcttgcctataacgggaatgtgtttgatgaggcgtttatcctgcgcttaaaatctcagcttctcacagcgattcagcagctcatccagaagccggatcagcctgtcaatacgatcagacttgttgatgaaaaggaaagagagcttctgcttaccggcttaaacccgccggctcagactcatcaggcgaagcctctgacagattggttcaaggaagcggtgaatgtaaatccagatgcaccggcgcttacgtattccggccagactctttcctatcgtgaattagatgaggaagcgaaccgtcttgcgcgccgtttgcaaaagcaaggtgcgggtaaggacactgttgtcgcgttgtacacgaagcgctcgcttgagctggtgatcggcattctcggcgtattaaaagcgggagcggcttatctgccggttgatccgaagctgccggaggaccgaatctcgtacatgctggctgacagtgcggcagcctgtctgctgacacatcaggagatgaaagaaaaagcggctcagctgccgtatacaggaacaacactcatcatcgatgatcaagcacggtttgaggaacaggcaagcgatcctgcagccgcaattgatcccgatgatccggcgtatattatgtatacgtccggcacaaccggaaagccgaagggcaatatcaccactcatgccaatattcaaggattggtcaagcatgtagactacatggcattttcagaaaaagatacgttcttatctgtttccaattacgcctttgacgcatttacctttgatttctacgcatcaatactgaatgcggcacggctcattatcgcagatgaacatacactgcttgatacagaacggctcactgatctgatccggcaggagaatgtcaatgtcatgtttgcgacaaccgcactttttaatcttctcatcgatgcgggagaggagtggctgaaggggcttcgctgtgtgttattcgggggtgagcgcgcgtcagtgcctcacgtcagaaaggcgcttgagatcatggggcccggcaagctgattaattgctacgggccgactgagggaacggtgtttgcgacagctcacgtcgtgcatgatataccggattccctttcctcattgccgatcggaaagccgatcagcaatgccagtgtttatattcttaacgggcaaaatcagcttcagccgtttggagctgtcggtgaactgtgcatcagcggaatgggtgtatcaaaagggtatctgaaccgtcatgacctgacgaagcaaacgtttatcccaaatccgttcaagccgggagaaacgctttaccgcacaggggatttagcacgctggctgccggatggaacaattgaatacgccgggcgtattgacgaccaggtcaaaatacgcggacaccggattgagcttgaagaaatcgaaaagcagctgcaggaatacccgggtgtgaaagatgcggtcgttgttgcagaccgccatgagtctggagatgcatcaatcaacgcctacctcgtgaaccggacgccgctttcagctgaagacgtaaagaggcacctgaaaaaacagcttcctgcttacatggtgccgcaaacctttactttcttagaggagcttcctttaacgacaaacgggaaggtcaataaacggcagctgccgaaaccggatcaggctcaggcggccaaagaatggatcgggcctcgaaacgcgacggaagaaacgattgcacacatctggtccgacatcctcggcagacagcagatcgggattcatgatgatttcttcgcgctcggaggccattccttaaaagcgatgacggcagcgtcgcgcattaaaaaagagctcggtacggacattccggtgcagctgttattcgaagcgacgacaattgcagacattgccggttatctgcttcacggtgaagaaaaaggaatgaaagatctcaccatcatgaataaaaatcagtctgacacactgtttgcgttcccgccggttctcggttacgggctgatgtaccagccgctggcaaaacagctgtccggctataaaatctgtgcgtttgattttattgaggaagacaaccgcatcgaacgctacacagagctgatcaatcagctccagccggaaggaccggtcaagctgttcggatactcggcaggctgcacgctcgcctttgaaacggccaaacgccttgaagcagggggccgtaaagtggagcggctgatcatggttgattcctataaaaaacaaggcgtcagcgacttggaaggccgcaccgtagaaagtgatgtccaggcgctgatgaaggtaaaccgggacaatgaagcgctgaatgacgaagctgtcaaagaaggtctcgccaaaaaaacaaacgcgttttattcttatttcgtgcataccgtcagcaccggcacggtcaatgcggatatagatcttttaacgtcagaaccggactttgcgatgccgccgtggctcgcttcgtgggaagaagccacgacaggtgaataccgtgtgaaaaaaggctgcggcacgcacgcagaaatgcttcagggagaatgtctcgaaaggaatgcggcatatttgctcgaattcctaaagaaggaacatctgaagctgacaacttcacgatagaaaaggaggaagcccgccaatggtccagctctttaaatcgttcgataccacagaaaaaacgcagctcatctgttttccgttcgcaggaggctattccgcatcattccgcccgctccacacctatcttcaaggtgagtgtgagatgcttgccgcggaaccgccgggacacggaacaaatcaaatgtccgccgttgaggattttgaacagcttgtcagtttatacaagcaggagttgaatctccatcccgaccgcccgtttgtgctgttcggccacagtatgggaggcatggtcgctttcaggctggcgcaaaagctggagcgggagggcatttacccgcaggccgtgatcatctcagccattcagccgccgcatgtggaaaggaaaaaagtgtctcatcttgatgatgaaaaatttctcgcccatattatcgagcttggcggaatgccgcaggagttagtggagaataaggaggtcatgtcatttttcctgccttctttcagatccgactaccgcgcgcttgaaagcttccgtccgtctgattctcacatcattcaatcacccgtccatatatttaacgggcggaaagataaaaaatgtatcaaagatgcggacggatggaaaaaatgggccgacaatcccgtatttcatgagttttcggacggccacatgttcatattaagtgaaactgaaaaagtggcggaacgaatctatgagattattaacaggagcactgcaggccaattgttataggatatgacagacagcattcgctgtctgttttttgtaacaaaatctgcccgcgagttttctcatttatcaaaaattttatgttatgatttgatggaatataattttgaagggattgtcgtacatgaatgatgcagcaaaagagctgaacagaacattatctgaagaaaacccgcacgtgcttcaaatgctttctgatttgggcagagagttgttttatccgaaaggggtgctgacacaatcggcggaagcgaaagccaaggccggaaagtataatgccacgatcgggattgccacctcacagggcgagtccatgcacttttctcatattcaagagacactgtccgcctataaccccgatgatatctacgattatgctccgccgcagggaaaagagccgctcagacaggaatggctgaaaaaaatgcgtctcgaaaatccttcattagccggcaaagacatcagcacgccgatcgtgacaaacgctttaacacacgggctgagcatcgccgccgacttgttcgtcaatgaaggggatacgctgcttctgcctgataaatattggggaaattacaatttcattttcggtgtccggcgcaaggcatccattgagacgtacccgctttttcagcaggatgggcgttttaatgcggcggggctgtccgagctgctgaaaaagcaggaagaaaaggcgattgtcgtgctgaatttcccgaataatccgacaggctacacgccgggagaagaggaagcggcagaaatcgtcagcgtgatcctggaagcggcggaggctggcaaagagattgtcgtgctcgtagacgatgcgtattacaatctgttttacgatgaaacggccattcaggaatccatcttcagcaaactcgcccaagtgcacgaccgggtgctttgcgtaaaaatagacggcgcgacgaaggaaaattacgcgtggggtttccgcgtcggttttattacgtacagcacaaaaagcgaaaaagcgctgcgcgtgcttgaggaaaaaacaaaagggattatcaggggaacgatttcaagcgccccgcacccgtcccaaacgtttatgctgcgggcgatgcagtcaccggaatacgagaaagaaaaatcgctgaagtataacatcatgaaaaaacgggctgacaaagtgaaagccgttcttgcagaaaacaagcactatgaagacgtatggacgccttatccgtttaactcgggttatttcatgtgtgtccggctgaaagacataaacgccggcgaattgagagtatcgttgcttgaaaagagaggaatcgggacgatatccattaatgaaaccgatttgcgaatcgcattttcatgtgttgaagaagaacacatcgcggatctgttcgaagaaatttatcaagaagcaaagcagctgcagaaacaggcggaaatatcaggctgataaaaaaggaggggggcaccctcctttttgtcttttattctgttacatttactttctcattcacattttcccggagcatttgcctgaaaacggcgatatctttttgcgaatagaaaagtcgtttcggcagcagaagtgttccgtaacccgatgtttgtaatcgaaacatatctttgtgctccctagccgagagcagttcatcccattcaaaaagaatgcttgcgtttttttgtttttggctgattccgagctgatgaatcgtaatacttctggcagatttcagccgctgattcgttttgtatgttctgtaaagacggaagaatgagattgccgttgcgatcaccgtgactgccaaagagagaatcacagctgcaaggaaattcaggagagctctgacgccccatgtgccgcctgtaaccgggccgttcattcaaaacagatggcagaagccagcagcataatcaaaaaacagacagccgcggattttccttgatgataagcaaagtgttttcttacatcggcaaatgttaagcagcccgcgagatagatattttcatttcgtgtgttgatcatattccgtctacgtttcctttcattttttccctatgtcgtaatatgctttttttcctccgtcctgaagcattgcttcccaagactccgatgacgatacagacggcgccggcgatatgataccagcggagtgactcatggagaacgaggacacccgcaagcatcgtcacgatgacggacaaattgttaaaggcgctcatcttaaacgcttcaatcttggacagcgcgtagtttgacatcaatgatgtaatgagagaagacaaaatgcctaaatacagaatcgctgcgataaaaccgggatcgcggaagggcagaaaatactgcccgatcgttccttccgctccgtgccggaagagagcgatgcagttgaaggaagcaaagccgatcgcagacatgcaccaggtcagctcacccaatgaaaaacgctgggtcgtgcgtctcgctgccgtattgtaaagggcggaggacagcgcggacaacaggatcaggaaagcacctttaaaactcgccgattccgcggacacccctttcattgtgaaaataaataccaccccggccactgacaggcatgtgaatcccttttgcgcccatgtcggacgttcctttaaaaagtaagacgaaaacagcatcgtaaaaatcgggatggcggcttgaatgataccggcttccgatgatgaagaatacaaaaggccgaacgcctgaaaactgaaaaacaaagccggatataaaagggccaaaggcaagatcgccagcacattcttccagctgacggacagtttgatccagccgaataaaacaggaagcattgcacagatgaaggccgctgtgaaccgatgagccaatatatcaaacggattggcggattgaagcgcaatcttgacaaatataaaggaaaaaccgataatcagcgcatttaaaatggcagcgaggtaagcagcagccaaacggttttgattaatcatctttacgaactcctttaatgagatcgagcgccggccgctcccttttattgtatgggaagggaagaagcagtacaatgagaataatgataaactgtaccggtacagatggaggttcagcatggaaaagtatatgaacgtgatgatagaagtggagagtctcattgaaggcggcacttttcaggaaggggcgcggctgccttctatcaggcagctggccgagcgttttcacgtcagtaaaagcaccgtcatccgtgcgcttcaggagcttgaaaaacggcacattatttatgccgtgccgaaaagcggctactatcttattaaaaatgacaaaaagcaggagcgagaacaaacaggtatcattgattttgcagcctcggcgccggaccctgatatttttccgtaccgcgactttcagcattgcatcaacaaagccattgatatgtataaaaatgatttgttcatttacggcacgccgcaggggcttccgtctttaatccgggtgcttcagacgctgttatccgattatcaggtatttgcaaaaaagcggaacatttttatcacctcgggtgtgcagcaggcgttatccctgctgtctctgatgccgtttccgaacggaaaaaagaagattttaatcgaacagccgggctatcatctgatggtggagcagcttgaagcgctgcgccttcccgcctgcggcattaaacggacggctgaggggcttgatatggcggaagtcgagcggctgtttcagacggaggaaattaagtttttttacacgatgccccgatttcataatccgctcggcagctctctgacagaatggcaaaaacgagagcttgtccgattagcggaggcgtatgacgtttatttggttgaggatgatttcctaggagatttagaggacaatcagaaggcagacccgctgtacgcctacgatctgtcttcccgcgtgatttatttgaaaagcttttcgaaaatgatttttccggggctgcgtgttggagcggctgtgctcccggattcgctggccccggttttccatacgtataaaaagctgagcgatatcgactgttcgatgatatcccaagcggcccttgaagtgtatatcaaaagcggcatgttcaaaaggcataaagaaaaaatccgggcctcttacagagcacgttccgagctgctccaaaacgcgctgcaggagtacgacggtttttctgtaaagcaaacgtcgatccatacccatctcgtgctggagaaaagcctttccgcttcaagagttgtgcagcgtctgaaagcgcaaggcgtgctggtggagccgattgacagccattacctatcggattttccgaaagaaaatatcatcaaactcaacgtgtccaacgtcaagacaggggatatcacgcgaggcatcaaaatgctgacggattgcttataacagctcttcatacgttttcatctcaatcccgtcacaaaaatcgggatgcgccgcacaaacggccagcttatactcctcgtccgcatcatatgtgcggatgaaacaaggttcatgcccgtccggaagctcaatggacacatggccgtcgtctttgaggcggacgctgaatgaatcaagcggcagggaaagcccttttccggcctgtttgataaagctttctttcatcgaccacaggtggtaaaaataatcggtctgctgatcggggtgtttcgcttgcagatcactgtattccgtcggcgaaaaaaaccgtttggcgatatcaatcgtgccgggcttcattttttcaatatcaatgccgatcggttttgaatcaacggcgcacacgatccagcgaccggagtgggaaatgttaaagtgcatgtccggaagcgcggggatgtacggctttccgtattcctgaacgctgaatgaaatcccggccggatcaagtccgtaagccttcgccgcagcggtgcggatcagcatgtcgccgatcaaggtgcggtgagcatcctccttatggtaaaagcgccggcatttttcccgcttttcggcggacacggccgccatcatccgatcctcttcccctgcagaaagcgggcggtccatatatactccgtaaatattcatgtccagatcctccgtctgaaaatattgtcaaaaccatcctatcatatcagacgaaagctgtccgaaaagaaaaaaacaaaaccgtttcggctttgtttttaatgaacggacgttgcccgcccggagatcgcgtatgttaacagtttagaggactgcggcaaagaaaaacgcagaatcagccccgtcaaaacagccgtaataatggttccggcgccgatcggtccgcccatcatccaggctgcggcaagaatcgtcagctcaatgccgttccgcacccattgcacgttccagcccgttttttcagatatcagcatcatcagagagtcccgggggcccgcgccgagccctgctgatacgtaaataccgacgccgcagccgatcagcagcaatccgatagaaaaacacacggccgctaaggaaaaagcgtgcgtctcaggaagcagaaacgaaaagaaatcaataaacattcccatcagcaccatgtttaagatagcgccgattttcgggagtgtcctcgtgaacaggcaggttaaagccacaatgaccgcgccgaccacgatggaccattggccgacagaaagcccgaaatgctgaaaaagcccataatgaaaggcatcccaagggctgatgccgagagcttttcctttaatggttaacgataccccgaaagacaaaatcaacagaccggcaaaataaaacgtccagcgcatcaagaattcccgcttcaaagaggtcccttctttcataaaatttcattaattgtcattgtagcataaccgccaaaaaaaagaagaagcgaaatcagtgtttcgcttcttctcccgctcctacaaaggattcagtatacgatttaaaaaccgctgcgtgcgttcttctttcggcgcggagaaaatttgctccggcggtccttgttccacaatgacgccgccgtcaatgaagatgacttcatcggccacttcctgcgcgaatttgatttcatgggtgacgacgaccatcgtccagccttcgttcgccagatccttaatcactttgagcacctcgccgaccagctccggatcaagcgctgacgtcggttcgtcaaacagcatcagctcgggctgaatcgcaagcgcgcgggcgatgccgacacgctgctgctgaccgccggaaagctggaacggatataaatccattttgtctttcagtccgactttttccagaagctccatcgcttcttttctgacttgctccttgtcgcgcttttgcacttgaacgggtccttccatgacgttttcaagcgccgtgcggtgaggaaacagatgatacgcctgaaagaccatgcctgatttgcggcggaggcgaagaatatcagcctgcttcacttttttggagaaatctattgaaaaatcggagaatgccagctcgccgcgattggggatctcaagcgcgttcagacagcgcagaagcgtcgtttttcctgaaccggacggtcccagaacggcgatgactttccctttttctatctccatatctatcttttttaaaatttcattctgtccgaatgatttatttaatcctttgacggaaagcatatcgaaacctccttatttggccacataacggtcgagacgccgttcgatcacgtgctgtacgattgacagcaagaagcagatgatccaataaataaaggcggcttcaatatagatgaccaagatttgatcaaggttttgcgcgccgatttcctgcgcttttctgaacagctccgcgacgagaatctgtgacgcgagagatgtatccttgatcaggctgataaatgtatttgataatggcggaatggacacgcgaaacgcctgcggcaggatcacgcggaacaatgtcttgcgataggtcatgccgatcgtataaccggcttcccattgccctttcggcacggatgaaatagatgcccggatgatttcagaagcgtaggcgcccacgtttaacgaaaacgcgatgactgcgcttgggaaagggtccagcgtaatattaaatgtcgggaacagataaaaaatgatgaacaattgaacgagaagaggagtgccgcgcaccgctgatacgtatacgctgaacacccatctcaatggtttcatatttgacattctggcgagcgccgtaatcagcgcgatgatcattccgaaaataaaggaaagaatggtaaggggaatcgagtaatagattcccccggaaagaatcggccagaatgactgctgcaccagatcccaaggaatggctgttgcaatcacgggttccggcatgttacttagaaacatcttcgccgaaccattttttcgctattttagaaagagtcccgtcctctttcatttcttttaacgctttgttgacgtgagtcacaagttcgccgcttccttttcggaatgcgaaatacgtctgctgcggctggcctgcttcaaacgcgattttcacgtttttattgccggacgtttttaagtagttcagtacggcaagcttatcgttgtaagtcagatcagcgcggccctgctgaatgagctgaagggattgcgccatgccttcaacgccttcaattttcgcgccggcttctttcgctaatttattgtaattgcttgttaatgactgagccgctgtttttcctttgacatcagcctctttcgcaatcgtgctgtcttttttcgtcacgacgactgcatttgacgttgtgtatttatccgaaaaatcatattggttctcacggcctgttttgccgacttggttggcaacgacgtcaaaccgtttcgcgtttaatccggcaaacatgctgtcccattgcgtttctttgaagtcagctttcagaccgaggcgtttcgcgacttcttgaatcacttcaacatcatatccggtcagtttgtcagtctttttatcatggaaggtaaacggttcgtacgttccttctgtgccgacggtcagtacgccttttttcttgacagaagcccaaagatcgccgtcttttgacttagatccgctgtcctgtgagtttccgcaggctgcaagcattgcgatgctgaccatcatgaacaaagcgaataatgcttttttcatcttctttattccccacttttctgagtagttttattgagaaaaaatagctcccaattgtaaaggataacttttttttagtatgagtcaagtaattggttttcataagcgggaattcttcgtgttccggatcaaaataatgccaaaaactgtctgaccggcttcggcagatagctgtcttttctccagatgacggccggtgtcatgacaaacgggttgtcttcgatgataaccgttttgacatgcgaacgcatatggacgggaatcatcgtcaaaggcagaattgtggcgccgaaccctgatgatacgaggctcaagagcgtcgcggagtcatggcattcacagacaacctgaaggtcgagaccgtactgttcacaaacttggaggacttggtcatacacacctcttccattgacggtccgcaaaaggatcaaaggcaaagaggcgatgtcattcagtttaatcgtttcaccgcacagtcgttttgaatgctcggacagcaccaatacacacggaatgtcttcaagctccttcgattcaatgccgtcgtttttaatcaaggtggtggtgacggcggcgtcaatctgccgggtttccagaagctcgagcagtgagacgggctcatcttcccaaatgttaaaagtgagatgcggaaaccgctctttcatctgtgacactttctcaagcatgagcgcggcgcagtaaatggttgacccgacggcaagtgtcccggccacctcctccttcagctcttgtacctcgattatagcgtcctcaaacttatgaagaatctctttcgctcttttcaaaaagacatttccttcatatgtaagggtcatttgtttctttttattgcggtcaaacagaatgacgcccaattcttcttcgagctgtttcagctgtctgcttaaaggcggctgtgccatatgaagctttttggcggccgtcgtgatcttctgctcttgggcaatggtgatgaaataacgcaattgccggatatccatgagaacgcgctcctttctgttatacctttaaggtatgatacatagatttaacgaatatttttcatatggatatatcaggagtatgatggttttgacaccacatttcaagcgtaaaggaggggtcaatatgaagcttgtcatcggaatgaccggggcaacaggagccatattcgggatcaggcttttagaatatttaaaagccgcggagatcgaaacccatcttgtcgtgtctccttgggcaaatgtcaccattacacatgaaaccgattatacgttaaaagatgtcgagaaactcgcatcctatacgtattcacacaaagaccaagcggcggcgatttcaagcggctcgtttgaaacggacgggatgatcatcgctccgtgcagcatgaaatcactggcaagcatccgcaccggaatggctgacaacctgctgacaagggcggctgacgtcatcttgaaggagcggaaaaaacttgtgctgctgacaagagaaacgccgctcagccaaattcatttagaaaatatgctagcgcttacaaaaatgggttccgtcattcttccgccgatgccggcattttataacaagccggctgacatggatgaattgatcgaccatattgtgttccggacgctcgatcagttcggcattcgtctgccggaagcgaaacggtggtacggaattgaaaaacaaaaaggaggaatctgataatggcctatcaggattttagggagtttctcgccgctcttgaaaaagaagggcagctcttaacagtcaacgaagaggtgaaaccggagccggatctgggcgccgctgcgcgtgcagccagcaatctcggggataaaacccctgcgcttttgtttaacaatatttacggacatcaccatgcgcaggtggctctgaatgtcatcggctcgtggccgaatcacgcgatgatgctcggcatgccgaaagatacgcctgttaaagaacaattctttgagttcgccaaacggtacgatgcatttccggtgccggtcaaacgggaagaaaccgcgccgtttcatgaaaatgaaataacggaagatatcaatctatttgacatccttccgctattcagaatcaaccagggggacggcggctactatttggataaagcgtgtgtcatttcccgcgatcttgaagatccggacaatttcggcaagcagaatgtcggcatttacagaatgcaggtaaagggaaaagaccgcctcggcattcagcccgtgcctcagcatgatattgcgattcatcttcgccaagctgaagaacgcggcgtgaatcttcccgttacgatcgcgctcggctgtgagccggtgattacgacagctgcgtcaactccgctgttatacgatcaatccgagtatgaaatggccggcgcgattcaaggggagccctacagaatcgtcaaatctaaactgtctgatttagacatcccttggggcactgaagtcgttctggaaggagagatccttgcgggagaacgggaatacgaaggacctttcggtgagttcacgggccattattcaggcggccgcagcatgccggtgatcaaaatcaaacgggtatatcatagaaacaatccgatttttgaacatttatacttaggcatgccgtggacggagtgcgattatatgattggcattaatacgtgcgtgccgctttaccagcagctcaaggaagcttatccgaacgaaattgtcgccgtgaacgcgatgtatacgcacggcctgatcgccattatttccacgaaaacgcgctacggcggatttgccaaggcggtcggcatgcgcgccctgacgacgccgcacggactcggctactgcaaaatggtcattgttgtggatgaggatgtcgatccgtttaacctgccgcaagtcatgtgggcgctctcaacgaaaatgcatccaaaacacgatgcagtcatcattcctgacctgtccgtccttccgcttgacccggggtctgatccggcagggatgacacacaaaatgattcttgacgccacgacgcctgtcgcgccggaaacaagaggccattattctcagccgcttgattctccgctgacaacgaaagaatgggaacaaaaactgatggacttaatgaatcaataagaaaggatgaggttgcaatgaaaacttgcccgcgctgtgaatcgaaaaaaggagaaaccgtcagccaatcgccggtcaaaggcgcttgggaaatttaccaatgccaaacctgctttttcacatggagatcctgtgaaccggaaagcatcacgaatccggcggcattcaacccggcatttaaaattgatccgaaagaaacggagacggccgcacatgttcccgctgttccggaaagaaaagcgtaatgatgacggagcacttgccggaggcgctttacacgcttttagacgggacggagcttgaaaaaaagcagcacgacgcatttgtgctccaatccgtgacaaaagaaggccgcccgcacgcggccatgatcagcgccggtgaaatcgtggccgtgagcagaacaaatctccggatcgccttatggaaaaacacgacgaccgtaagaagccttctgcattcgggacaagctcttttcatcgcctggcacggaggagccgcatattacgtcacattggaatgtgaggcgcttccgccgctgaaagaggcgaaacacgagcgggaacggttcagctgccgcgtgatcaccgtcaaggaagatcgggcgaaatacgcggatctgacatccggaccggccatccagctccacgaaccggaagatgtcttgaagagatggagagaaacgcttgaggagttaaaacaatagacgcatcaaaaaagcctgcggacgattccgcaggcttttctttatctgttattgtacgcctttcatcgcccgtttaatgacgggagacagaagaatcaaaataataccgagaatgatcgaaacaagaccgattgagccgaagtaggccgcttcagaaatcttatcaaacaaaccgactacttttgcgttcagggcttgaccgcaggcgtttgttaaaaaccacatgctcatcgtctgcgctgagaaagcggcaggcgcaagttttgttgtgacggataaaccgaccggtgaaaggcaaagctcaccaagcacaaccaaaaggaagctgagcacaagccaaagcgggctcacaagctcaccgctcccgcccataaccggaagcaccatgactaaaaatgataatccggcaaggataatgccgatggcgaatttaatcggtgttgaaggctggcgtttgccaagcttcatccagatccaggcgaacaccggcgcgaaaataacgatgaataacgggttcagagactggaaccatgaagactcaagatgcatgcccgcaaaggaaagtctcgtgcgctgatccgcatataaagcaagaatcgtcgcgccctgctcctgaatcgcccagaacattgccgctgcaacaaacagcggaacataagccgcaagccgtgatttttccgttttcgtcgcttttttgctcgtgaacatcacgataaagtaaataaccggaatgacaatgccgaggatactgacggtatcaatcacacgctggatcgtcagccagccggtttgaatcagaacgatgataactgctgctgcgatgaccactccgattcccgtgccgatcactgatgatttagaaatcggattcggtacattggagcctgctttgccgaggtatttctttctcgtaagagcgaaaacaatcagtccgaggaacataccggccgcggcgcatccgaagcctaagtggtagttgtacttctgtccgagtgttccgacaattagcggcgcaagcaatccgccgaggttgatccccatgtaaaagatgctgaaacctgagtcgcggcgctcgtcttccttcgtatataaatctccgacaacgctggatacgtttggtttaagcaggccggttccgataataatcagagccatgctggtaaaaaacgccgccgtgctgccagggaaggcaagagcgatgtgcccgaacataattaaaattccgccgtaaaatacggtgtttgccgtgccgaatacccggtcggccagccatccgccgatgacgctcgacatgtatacgagagacccgtatatggacatgatggcaactgcggtcgttttatcaaagccgagaccgccatgagcgacttccgtgtataaatagtaaagcaatatggctctcataccatagtaggagaaacgctcccaaaattcggtgaaaaacagtgtaaacaagccgcggggatgaccgaaaaagcctcgttgcggcacagtttctgttatagagtccttatcaatagatgccacctgagccaaccctttcttaaaaaagtgtattacaaaaatcatattcttatataatacttgtgtcaatataatttatactgaattcaaaaaattccagaatgaaaagatattaaaacgttgaatatagacgaattttcctaattccaatgacttattttgttatattatctgactaaactatctttataaacttttttaataaaatttaaagtatgtacaggcggagcgggatatggcggaataagatgacaataagagaggaaggaggagattatcacttgccgaatcgtatattggatattacggattgcggtgtggcggcagacggaaaaaccgatgtgacgggcgccatcaaccaatgcttggccaaggccgtcagcgaaggctgtcatacggtgttttttccgccgggaacctataaaatcaacggcacgcttggcggggacagcagccagccgtttcggaacgccgggattaacgtgccgagccatctcaccatcgttttagatccggaatgcacgattaaagtggcgccgaacagctcctggggctactcggctttctatataggcaggcgggaaaatgtcaccatcaccggcggccggatcatcggcgaacgggatgaacacacgtataccaatgtccctttgcgttcgacccatgaatgggggtttggaatctgtattgaaggcagcagcaatgtgctgatcgaaaatgtgaagatttcggattttacgggagacggcattattgtcagcccgctcgggttaaaaacaaacagtgattacgaaacttcagaacaggtgaccatccgccgctgtgagatcaggcagtcaaggcgaaacaacatttcaatcaccggctgcaataccgttacggtggaagaatgcgtgattgaagacgccgggcaagggaacggaacggctccgaaattcggaatcgatattgaatcgtacggagaaggcgatattgattatgaagaagctcttcatattacggtccgcaacaacttcttttccggaaacgccgcaagctcagtcaccaattttaacggatatcatgtgttaattgaaggaaatcattccgataacacaatcagctacgggtatggggcacataccgtcatttcggggaatgtcttctttcggtcagacggcggctcaaggaccgcagtcgccggacaaggtgtgtcacaaggacaggacagcagcaatgccgtcatttccaacaatctgattaccggtttttccaccggaatagatgtaaggggaaaaagcgtcctcgtcacccataacaaaatcagtcaatttgaaaatacgggcatttccgtctatcaggcagaagatgtgaccgttgacggcaatgtcattgaaaacggacgttccgaaacgagacgaagcactgggatgcgggcgacgctgtcggaaaacgccgtctttatgaataatactctgaatcaggtaacggacggaatcagcatgtcggccggcaatatcaccgtaaaacaaaatgtgctgacatcgttcagccggggcatatgggtcacaggcggaaatgccgttattgaaggaaatacgctgattccgaatgcgtatcagggcgccgcggagtcctatgccgtatctgtgacaaatgacgccagggctgtcatcaagggaaatctcttcaaaagctacaaaaactatcccattttcagttcaacatcctcgggaacctctgtcatcagcaaccgctttgaatcatcaccgcttatcgttaccgtgtatctgaattcaggcacgcatgaagtcatagacaatacgctcacgatcaaccgaacggcgggcagcccgatcggcatctatctgaacggagcctcaaattccctcgtgtcgggcaataccatcaacaacctttccgccgcttctgcttccgccatacaaaccaattcttccgcaagtactaaaatcatcggcaaccgcattatcaaaggcgtcattgtgaaacacgcgacagatacggacagcggaaatatcgtcatctgaaaacaatctgcatcggaaaaataaaaagaacacatgaactccgaaagaaggagggatgtgttcttttttgaaacaatacagccgtgcgcctgtcaggcatcttttttacctgatttatataaaacgatcatttctctgattaaaaagagggcgaataaaaacagcatcagccattctgagaaggtggtcaatttaaaagcggacaggttgttttggaccgctccatagaaactgaaaccttgcagcatatctatcgttactgaaatgatcagacaggcagccagcaaaaaaaatgaaacccccaatattttcatgcgcatcactctccctttttatccttttcgattacgcagaacttatacagactttccgccgtgcataatcttttgccgtacaggaagaatatgaaaaaaacgaggaaaggttttttgcgatatgccgccattttttaagcagaagaaacaaaaaaaagccgatcaaaacgaccgtgacaatgaaggcagaaaagaagcggacagccagccggacaaagagcgggatgagccgatctccctcagcttaaagcaaaatatgaagaagctgtctgagaggttcggcaacagtgccgatgtcgtcatccgccggcttaaaatcggaaaagaagagcttccggccgcaattgtgtatatcgccggtttggtagacgaacagctcgtcagccaatcccttctggaggatttaatcgacatcccgtccgttcagccggaacaagcggtctgcctgatatacgataaaacgcttgcgatcggcggggtgaaagaggcagaaaaatggaaaagtctttatgccgggctggtggcgggcagcacgctcatttttgtcgacggggctgacaaggcgctgatcgccagcacggaagggggagagcaccggtccattcaagagccgagcactcaggtctctttccgcggcccgcggcagggattcactgaatctctgcaaaccaatatttccatgatccgcaggtatgtaaaaacgcctgatgtatgggttgaaaaaatggagatcggacacgaaacgaatacggatgtcgcgctgatgtatattaacggaatttgcgataaaaagctgattaaggaagtccgcaagcggctgaagcacattgacatcgacagcattctggaatccggctacattgaacagctcattgaagacgcgccgttttctgtgtttcccaccgtatatcatacggagcggccggacgttgtggcggggaatctgctggaaggacgatttgcgattatcgtggacggaacgccgttcgttctcatcgcgccggccttatttattcaattttttcaatctgttgaggattattattcacgatttgatatcgccacaagcatcagggtgctgcgggttttgattttcttcatttcactggtggcgccggggatttatgtggcggcgacgacctttcaccaggaaatgattccgacgcagctgctgattgtcatcgcggctcagcgggagacggtgccgttcccggccgtgattgaagcgctgacgatggaagtggcctttgagattctcagggaggcgggtgtccggcttccgagagttgtcggctccgccgtttccatagtcggagcgcttgtcatcggccaggccgccgtacaggccggcattgtttccccagccatggttatcgtcgtcgccctgacggcgattgccagctttgcgaccccggcttttgacatggcgatatctgcgcggctgatccggtttctttttattctgtcggcggcggtcatgggattttacgggctgattctgggcattatcatgatgtttgtccatctgtgcggcctgcgttcattcggatttccgtatatgtccccgctcgctcctttaaccccgggcgggctgaaggattcccttcttcgagctccgttatgggcggatgaaaaaaggccgggactgctcgtgcaggaaaacaacaggcgccaaggggaacatcaaagaccgaaaccggagacatccagaggaatggttaataaagatgtagaagagggcgacggtaatgaaaagacgtaaatggatgcttatcctttgtacgatggtttcccttatgtttgtatccggatgctgggataaaagggagctgaccgatctagcggtgatctccgccatcggtattgaccggaccgaaacgggaaaatacgtccttcacttgcaaattatcaatccgggaaacgtggccggcggtctgcagggcggcggagcgggagaccggcctccggtttccgtctattcggtgtccggagacaatatgacggaagctttgagaaaaggctcgatgaaagtgtccagaaggctctattttgcgcatacgaatctcgtggtgttcagtgaaaaactggcgaaagaggaagggctcagttttattctggacaatcttgaccgcgacaccgaattcaggacgaccgcaaccgttgtgatcgcgcataattgcaaggctgaagacattattaaagtgctgacgccgattgataaaatcccttccaataaagtgaacaagacgctcagcttcacgcaggaacaatacggcagagtcattaaaaccaaccttcaggacgttctgattgatctcgcttctccgaccgggtcgccgtttattccgggttatgaaatgcacggagacgataaagccggtcctacgatggaaaatacgcagacaactgaaccgaaagcagtgctgtcagcggacggactggcggtgttcaaaaaggatgggaggctggattactggattgaggatgacgacagtgtgggggctgtatggctgctcaataggatcaagcatacgttcatcaatgcggattggaagaacgtgaagcatgcaatcagtctgcaggtcacccgccagaatacaaaggtgacggccacttttccgaacggaaaaccgcatattcacgtgcatgctcaggtcgaggggctggtggacgctgtcagataccctttccatctgtctgatccgcaagtgctgatgacgatgcaaaaggcgctcagcgtgcagcttgagaaagatatcaccaaatcgattgaagatataaaagcccataagaatgacttcgtcggcttcggagacctgatctatcggaagcatccggacaaatggaaaaagttcaaaaggaagtgggatgaagaatatttccccaatctccccgtagatgtcaaaacggaagtcattatcagaagaacgggcttgcggaataatcctctctcagacaagcttgagcatgattgatttgaggagaaaggagcgaagcgtatggaaaatgcgaaaatcggcacgcgtcagctgtttattatgatcattttgtttgaattgggcagttcgttattgatcccgccgggcacgatggccgggcgggatgcgtggctgtccgtgcttctcgggtgcgttatcggtctcggacttttctacgtttatcaggcgctgtatcaattttttcctgagtcttctccgagagattacatgaacgaactgatcggcagacatctgagctgggcggtctcccttctttatattctctattttgcttatatcgccgcccgcgtattgcgggattttggcgaaatgcttgtcaccttcgcctaccaggacacgccgcttttaattgtgaatgccatgctgatgatcgccgcaatatttgcggtcagaaagggaattgaagtgatagcgagagccggcgagctgctgtttggcattatgtatttcctgacagccgtcgggctgatcctcattatcagctcaggcacgataaacctcagatttctccagcccgttttagcggagggtgcaggaacggtcatttattccgtgtttaaacagacgatgttcatcccgttcggtgaattaatcgtgtttgtcatgattttcccttatttaaaagatcggaaaaaggtgaagaaaaccggatttctggcgattatcatcagcgggctgtttttggcaatgtcagtggcgattaatatttgtgtgctggacgtcaacttaatgctccgctctcaatttccgctgctgagcaccatacagacaattaaagtggaagagtttttagaccggctggatgtctttttcatgctcgtgctcgtcatcggcggttttttcaaagtcagcctttttacatatgcggttgtcgtgggcgtgtccacgctgtttaaagaaaaaaatccgtcccagctggccttcccggtcggattaggggtgctgattctctccatcagcatcgcaagcaatttttcggaacacatgaatgaaggcttaaacattgtgccgatctatattcatcttccgtttcaagtgctgttccccgttttgctgcttatcattgccgttattaagaaaaagctcaaagggaccgtctatacagtttcgaagaaataacccggccggtgcgccgggttttttaaaaaatcatgatttttgtcttaatgcattgacaaacttgcctgacaattgtacattttgatttattcttataaaattactaggaaatataggtttagtggtgttaatatgttccgaaaccgtatttcagaatagaaggagatccatcatgacaaagaaaaaagaaatcaaactaggtgtgtttctcgcgggcaccggccatcatgtcgcttcttggagacatcctcaggcaccggcggacgcgagcatgaatttggattatttcaaagaactggcgaaaacagcggagcgggggaaattggacatgctgttcttggcggacagtttatcaatagacggcaaatcacatccgaatgtgctgacgcgctttgagccgtttacgctgctgtcggcgctcgctcaggtcacatcccgcatcggtctgacggcgaccgcgtctaccacatacagcgaaccgttccatatcgcgagacaatttgcatcgcttgaccatctttccaacggccgcgcgggctggaatgtcgtcacatcttcgattgaatcgaccgcgcttaatttcagcggcgaaaagcatcttgagcaccatctcagatatcagcgcgcggaagaattcgttgaagtcgtcaaaggattatgggattcgtgggaggaagacgcctttatccgtgacaaagaatcaggagcatttttcgataaagacaaaatgcatgaattgaaccataaaggaacatatttctccgtgagagggccgttaaatgtcgcccgcacacctcaagggcgcccggtcattattcaggccggatcatcaggagacggaaaagcgctggccgccaaaacggcggaggtcattttcaccgcgcaaaatcatttggagtccgcgcaggaattctatcaatctattaaagaacaagcggcttctttcggccgtgatcctgaaaaaatcgcgatcatgccgggaatttttcccgttatcgccgataccgaagaagaagcgcaggcaaaatatgaagagctccaagacctcatcattccgtctgtcggcctgaacattctgcaaaactatctgggcggcgtcgatctttccgcctgcccgcttgacggcccgctgcctgaattggatgcggatgcgtcgaatgccgttaaaagccgcttcaagctcgttcaggagatggccaaacgcgataacatgaccatccgcgagctgtacaaatatgtggcgggttcaagaggccatcatatctttgtcggaacgccagaacagcttgccgataagatggaagaatgggtcggaaaacaagcttgtgacggtttcaacatcatgccgccgcttttgcctgaaggtctcactctttttgtagacaaagtgattccgattttacaagaacggggcgtgttcagaaaagagtatgaaggaacgacgctgagagaacatttcggactggaaaaaccggcaaaccgatatgccgactgaaggagggcttatcatgtcaagacaataccggctcgcaacggaggcagacgctgatgagctgctttcactgacactgcgggcgtatgaaccgatccgcaagctcggcatcaactttgccgctgccacggcggataaagaactcgttttgaataacatacaaaaaaacgcctgttacgttttggaggaagacggccggattctggcgacgatttctctgcggatgccgtgggggccgaatcccgggccgtacggtgttcctcatatttggtggtttgccgtcgatcctgaaaccggaaaaaaagggacgggctcagacatgctggagtggctggagaatacagtgctccgcgacacattaaaagcgcctttcgtgtcactgggcacagcggataagcatccgtggctgatcggcatgtacgagcggaaaggctacgtccgtgcaggcgaaaaggatctaggaaaagggcacatcaccatctatttaaaaaaacaattgcaggattaacatattaataggaaaaggcgggattttaatgaagaagaaaacatgggctttgctgctgtctgccgcgcttttggcggtcttatcagcatgcggaaacggaaaagaaagcgaaggcggcgataacgtactgcatgtcggcgccacgggacaaagctatccgttcgcatataaagaaaatggcaagctgaccggctttgacgtggatgtcatggaagccgtcgcgaaaaaaatcaacatgaaactggactggaagctgcttgaattcagcggactgatgggagagctccagaccggcaaactcgacaccatctctaaccaggtcgctgtcacggacgaacgcgagaaaacgtataacttcacagaaccgtattcgtatgcgggcactcaaatcgtcgtcaaaaacgataacaaagacatcaaatcagtcaacgatctaaaaggaaaaacagtggcggccgttctgggctcaaaccacgcgaaaaaccttgagagcaaggacccggataaaaaaatcaacatgaaaacatatgaaacacaagaaggcacgctgaaagacgtggcttacggacgggttgacgcttatgtaaacagccgcagcgtcctgatcgcccagatcaaaaagaccggtctgcctctgaaattagcaggagacccgattgtctatgaaaaagtcgctttcccgtttgcgaaagatgcggctcacgataaaatccgcaaaaaagtaaacaaagccattgaagacctgcgaaaagacggcacgctgaaaaagctgtctgaaaagtactttaaagaagatatcacaacagaagcaaagcattaagaaacggcggtgaaaatcgagaatgaacagcattgattggggatttatgttttcagcttttcccgcgttaatcgaagccttgccgatcacattactaatggccgtcgcggccatggtatttgccgtgatcggcggccttatattagcgcttatcacaaaaaatcgtgttcctgtgcttcaccagctgtcaaaggtgtatatttcatttttccggggcgtgccgacgctcgtccagcttttcttaatttattacggcctgcctcagctgtttcccggaatgagcaagatgacggcgttaaccgcggcgattatcgggttaagcctgaagaatgccgcctacttggctgaaatcttccgcgcggcgctcaactcagtcgatgaggggcagcttgaagcctgtctgtctgtcggaatgacaaaatcccaggcgtacagacgaatcattttcccgcaagccgtcagaaacgcgcttcccgcgacgggaaatacgtttatcggcctgttaaaagaaacatcgctcgcctttacattaggagtgatggaaatgttcgcccaaggaaaaatgtacgcatcaggcaacctcaaatattttgagacgtatttagccgtcgcggtcatgtactggattcttacgattatttacagtgtgctgcaggatctgctcgaacgggcgatcagcaagccttatcgcacataggaggaggctcaggatgatacaagtcagacatattcgaaaagcatttaaagaccttaccgtacttgacgggatcgatcttgagatcaaaagcggcgaagtcacggccatcatcggcccgtcaggctcgggaaaatcaacgctcctccgttgtttgaatctgctggagcgcccggatgacggcatcattgaaatcggtgatgcaaagctgaatgcagcgtcctattcgcgcaaagacgttcataagcttcgccagcagacggcgatggtgtttcagaattacaacctgttcaaaaacaaaaccgccctgcaaaatgtgacagaggcgctgatcaccgcgcaaaagaaaccgaaaaaagaagcggaacagatcggtatggatctgctgcggcaagtcggtttagaacacaaagcggacagctacccgattacgatgtcaggcggacagcagcagcggatcgggattgcgcgcgccttggccgttgatcctcacgcgattttactggatgaaccgacttcggcccttgaccctgagcttgtagccggggtgctccaagtcatcaaatcaattgccgaaaaacagacaaccatgatcatcgtcacgcatgagatggcttttgcgcgtgaagtggccgacaaagttatttttatggcggacggacgcatcatcgaacagggaacgccggaagagctgtttgacaatccgcagaacgaacggacgaaaaaatttattaagcaagtgggagagcccgccgaacttgtctaagaagggaagaagaagaaatggcaaatgaaacgtatgaatcattaaacaaacgtttaatcaatatccgccgcgaccttcatgaacaccctgagctgtcaggcgaggaatacgaaacgacgaataaaatccgccgctggctggaggaagaaggaattacggttcttgatatgccgaaacttcaaaccggagtgatcgctgaaatcaaaggagacaaaagcggccccgtcatcgccgtcagagcggacatcgacgcattgccgatcgaagagaaaacaaaccttccgtttgcttcgcgcaacagcggcgtgatgcacgcctgcggccatgatttccatacggcatctatcctcggcacggcttttttattaaatgagagaaagcatgagctgaaaggaacggtgcggtttatttttcagcccgcggaagaaatcgccgccggagcaagacaggtcattgaagccggcgcgcttgacggtgtatcggcgatattcggcatgcataacaaacctgacctccccgtcggcacggtcggtctgaaagaaggcccgctgatggcgagtgtcgaccgctttgaaatcactgttaaaggaaaaggcggccacgccggaatccctgataacagcattgatccgattcaggcggcagggcagattatcggcggcctgcaatcggttgtcagcagaaatatcagctcgctttataatgccgtcgtcagcatcacaagagttcaaggcggcagctcttggaatgtcatcccggaccatgttgaaatggaaggcaccgtccggacgtttcaaaaagaagcgcgtgacgctgttccgaaacatatgaagcgggttgccgaaggaatcgcagccggattcggggcagaggctgatttccgctggtatccttaccttccgtcagtgatgaacgacgcccgtttcatacaggcggcggaacaaacggctgaaagcctcgggcttcagaccgttcgggcagaacagtcgcccggcggtgaagactttgcattatatcaagaaaaaatccccggcttcttcgtctggatgggaacaaacggaacagaagaatggcaccatcccgccttcacactcgacgaaaaagcgctcccggcagcggctgagtttttcgcccggcttgccgtcaatgtattggagcagacggaatgaatacggaaaatctgacggccggacttgctcaggccgtcatgtcgtctgtgccggaaacatccgctgaagcgatgaaagaagcgcgcaaaggactgcttgattttacagcggcagcttttgcggggagacgggataaaggagttgaaaagctggtaaaactggccgaagaagaaggcggggtgccgatagcgccgcttatcggcagaaatcaaaaaaccacgccgtcccaatccgcgctcattaacggattcatcgcacatgcgcttgattttgacgacgttcattctgatgtaagaggacatccgagcgcagtcatccttccggctttgattgcagccgcatcagccggccgtatagacaaaagccgttttctcggtgcttatgtgacgggaattgaagtgatggcgcggctcggcgagtcagctggaaggcatcattacgagaaaggctggcacaatacaggaacgttaggtgccattgcggccgcatgcgccgtcggattcgcggagaatctgaatcaaacccaattgcagaaagcaatcgggtttgcggctgcccgttccggaggcatgagagtgcaattcgggacagaaatgaagccgctccacgccggactggccgctcaagccggattgttcgccgtgcagcttgccaaggccggtttcggcggctcagttcatgcgctcgacggggagaaaggttttttcggactgtacggcgatcttgaacgggcagaaaccctgcttgtaaacgggtggggaacaccttggcggattgtgagcccgggactttggtttaaggtttatccgttttgctcggcggctcatcatgcggcggacgccattctcaagctgaaggccgaacatggtctcactttcggccaaacggaacggatcgacgtgatttatccgccgggcggtgacgctgcattgacagaacggcgtccgaaaacaggcgaagcgggaagattcagcgtggaatatgtgatcaccttagctttgcacggtaaggatttttcagttgaacatttcacatccgagccgattccggaatcccttcaaaaaggatttgagcggattcaccgcagctgcgatgatcaaattcagccggctgacaacgccgttccgaagggccgttttacaattgtacgggtcacggcttccagcggtcatgtttatgaaacacgtatcgactgtccgaagggagcgccgggaaacggtctttctgaaaaagacattgaagacaaactccggctcgctttaccgggagaagagaaaaaggcggaagaattgatcaaagcagccggacaatcaaatatggaccgttatttacagctgatataaataaaaagagcggggggatgcagccctcgctctttttacgttcacttctattgaatagggggatatagggtgcgcccctgtctgcgctggcaggggcgcggtatcaggaaacggccgtgccgttttctttaaccgtgaaacttcctcttgataagcggatgttgatatccgaaactttggcaatttgttcgtcgtgcgtaaccatgatgacgcatttgccgtctttatgcgccagatcctgaaagagccggacgatttcctttgacgtatcctcgtcgagatttcccgtcggctcgtccgcgcaaatcaaatccgtgttacagcagaaagcccgcgcaattgaaacgcgctgctgctgtccgccgcttaatgtcagcacccgctgacgggcctgctgttcggtgatgccgacttttttcagcatgctgagcgcgaacgcatctttgttgttctccttagagtcggtgatctccatcgccgttgtgacattctggagcgccgtcatatacgggatcagatgataagattgaaagacgatagagacatattgatttctgaatttggttaatccgattttggagatgtcttttccgttataaaggatgcttccctctttaggtgtgtcaaggccgcccgccagagacagaaacgttgttttccccgttccggaggcgccgacaattgtataaaacttccctttttcaaagctgattgttatatcctgaaacagcggctgtgatttctcttggtaccagtagccggtctgttgaaaggttaataggctcattatgctgcctcctcttactcctgcttggtcaggatcgttttagggtgaagccgcatgactgatacagacggcagtaatgtggcgatgacggcaattgcgacgccgatcccgccaagaatcagaaggtcattcagtgagacgtttacctgcattgtactgatgacatccgcgccggatgaatgctgaccgaacaagccgcctccccgcggcatttctccgccgccccagccgcttgtttgctgctgtgaatcattggctgagctgacctgctgggaaagaagctgatttccgagctgattcgccacaaggctgcccgtgacggatgcgatcccgatggcaataacggcgacaaccagaatttccgttaagaattgtccgatgagcttccagcgcttttcgccgatcgccatcaagacacccatttcatacttgcgttccctgatcgacatcatcacgatcaacccgagaatgaccgcgcccgcgatggatacaaggtataccacgtttttagaaaatgacgcgacattttcaatcgggccggccatttgctgatacacctgatcatttgtcgtcagcgtgtaggttttatcaactatggatgtttttttcgcagccgcaacgaatgagtcaatatatttggcatcatccatataataaacggctgagctgattttgtttttgtaatcagacccttttaacgccgccgcggcggtgtaaggcgtatagattttattgtcaggatttaagaatgaaaaatgctgtgcctgatcgtctcctgatgatgttgttttatagattcccacaattttaagcttcgttttcacagaatcatccgctgctgaggatacggtaatggagccgccgaccttcagcttgttttgatctgccagcgtttcattaatcacggcgacttttgcgtccgcatctgtctttgtgatggcgcgtccgtcagtgatttttgagctcccgcctgtgaaatcatcaagcaatgccgtagagagcacgccttcgatcgaaatatccgctgaaattatctgtcttccgccgccttgaaaacggccgtcgccggaactgttatcggctgattcgcctgagctttttatcgcatcaaagctttctgcatttgctgacgctgtcgtgaggaagttgtaatttttaacatgctgtaaagatgtaagcttcttggcatctgagacggaaatcggcgttgattcaaacgtcctcttttcaccgtctttttgctgctgcgccatttgcttttggcggtcagcctggagtgtgacgctcccgccgagctgctgccttgccagttcgcttgatttctttgctgctgactggatcgtaagaccggacaggacaaaaatgcaaatcactgaaaacacaaccagctgcaaaaatgtttttcccttttttgccttcatgctccaaaaggctctttttataaagttcatgtctgttcctccgtgtgggtgtcagatcttgtaaaaccggccttctttagcaccggccatccgatatgtatatagtaggagaaatgtatgaaaaaaatatgaacaaactatttccggatgatgaaataaaaactaacaattgtgaaacccgaaaacacccgggtaaaatggtgctattataagaaaaagcgtgaagataagcggaggaaccaatgaagatattaatgatagaagacaatataagcgtatgcaccatgacggaaatgttcttttttaaagaaggatttgaagccgaatttgtccatgacggagtggaaggctatcagcgtttcacggaagaggactgggatttggtcattctggacattatgcttccatcaatggacggagtgacgatctgccggaaaataagagagacgagcagtgtgccgattattatgctgaccgcaaaggacacggagtctgatcaggtgatcgggtttgaaatgggagccgacgactatgtcaccaagccgttcagcccgctgacactagtagcgcggattaaagcggtgatcagaagataccgggcgacggggcaggccgttaaaagcgacgacttgatcgaaacggcgtgtttttcaatcaataagaagacgcgggaagtgtttctgcacggaaaacctgtcgagaatctgacgccgaaggaattcgatctgctcttttatctcgcacaaaacccgcgccaggttttttcgagagagcagctgcttgagcaggtgtggggctatcaattttacggcgatgaacgtacggttgatgttcatattaaacggctgcgcaaaaaactgtccagtgaggaaaaaccgtttttatacacggtgtggggggtaggatacaaatttgatgaggattaaatacttatatcagctgctgttaagtcatgtcagcattttgattttggcctttttcatcatcatttccctgttttcgcactttgtgaaagattttgcgtatcaaaataaagtggatgagctgtcttcttacgcgcagcagatcacaagtgagctgaacggccgcgatcttgatctgcgccgcctgtatccgtatcaggacatgttaaaaacgcgcgagaccaggtttattatttttgatgaacatcagcggccttacttttttcctgacgatatgccgccgcgcgagaagctgaaaagtaaagagtggcacatgctgaagcaagggaaaaccgttcagatcagagcggagatgaaccgttttaatacagaaggtttagaagtatcgcttgtcgcaaaaccgctttttatcaacgatcaatttaaaggcgcggtgctgctcgtgtctcccgtcagaggggtcgagcagatgatcagccaggtcaaccgctatatgatttacgcgatcatcagcacccttatcatcacgattctgctgagctggcttttatctaaatttcacgtcaagcggattcagacattgcgggatgcgaccggaaaagtggcatccggtgattacgatatttcgctcaagaacagcggcggcgatgaaatcggcatgctggcgtccgatttcaacatcatggccaaaaatctgaagcaatcgagagagcagattgaccgccttgaaaaacggaggcgccaatttatcgccgatgtctcccatgagctgagaacgcctttgacgaccattaacggacttgtggaggggcttaacagcaacaccatcccggaaaaagataaagagaaatgcttctcgctgatcagcgaagaaacgaagcggatgctcaggctcgtgaaagaaaacctggattatgaaaaaatcagatcccagcaaatcaaactggacaagctcagtctgccgctcatcgaggtgtttgaaattattaaagagcatctcaatcagcaggcggaggaaaaacaaaatcagctgcggattcaagtggaggacggcgtcaaagtgttcgccgattatgacaggctgatccagattctcgtcaacatcacgaaaaacagcattcaatttacgcaaaagggagacatcacgctgcgcgggtatgaaggctataaagaaacggtgattgaaatcgaagacaccgggatcggcatctccaaagaggaaattgaacatatatgggagcggttttataaggcggacgtgtcccggacgaatacggcatacggcgaatacggactcggcctttccatcgtcaggcagctcgtcgaaatgcacaagggtacgatagatattgacagcgaaaaaggaaaaggcacgacctttacaatccgccttccgctgaatacgaaaaatgaatcatcttgaaaccggcggtcccgtctggccgccgtctgttttatctccgctcggaaaattgcgctctgccgaaacaaagtttgcgtgtttttcgggatggaaagagacggaaacgtgataaaataactggtaaacaggtcttggatggggagggtgaaggaatgaagagcgggttaattccttcttcagcagtcgggcagaaaattaacgagtggtatcgatacatcagaacattcagcgtgccggatgcggagatcttgaaggccgagatcaaacaagagcttgaccatatggagcctgattcgaacttagtgctttattattccctcatggaatttcgccatcagctgatgctggattacttggagccgctggaaaaactgaagatagaagaccagccgaccctgtcggaaattcttgataacattgataacagccaggccggcctcaaagggcttctcgattattacgtcaactttttcaaaggcatgtttgaatttgataaaagagaatttatctcagcgattacatattataaacaagctgagaaaaaactggccttcgtatcggaccacgtggaacgggcggagttttattttaaagtggccgaagcttattatcatatgaaacaaacgtatttttctttgatacatataaaaaacgcttatgaaatttacgtagagcaggacacatataacgtccggatcattcaatgccattttgtattcggcgtcaatttaatggatgaaaggcgctttgaacaggcggccaaacattttcagcacgctctgcaaatggccgaaaaagaacaaaaagcgcagcttgtcgggagggcgctgtataacctcggactgtgctactacaatcaggaccgcatcggcgaagcgattccgtactttgaacgggcggtcgatacatttgaatcacaaagaatcgtcaattctcttcctcaagcatattttctaatcacactcatttactttaaactcggaaaaaaagaaaaagcgtcggaatatcacaagcggggatatgaatatgctaaagaaacagacgatcccgtttacacggtaaaattcgaatggctgcaggctctgtatcaggcgaaaccggatgaggaaacaatcagcgcgtgtttccgttacctggaagataaaaatttatacgccgatatagaggatttagcactagaagcagctaaatattactatgaacaaaattgctttaaaatttcttctgactattttctgaaagtcgaagaggcaaggaaacaaatacaaaggagtgagggtttgtatgaaattgaaatctaaatggtttgttatttgtttagcagccgccgcgatttttacagtgacaggtgcaggccagacagatcaggctgacttccatgtagctgaaagaggaatgacgtgagaagaaaatagcctgaacaaaggaaaagactgcatgggaatgttcccggcagtctttttttgcgcggccggactcggacagcggcggaaaacaaaagaaaacgccgcaggtcaaaacccgcagcgtcctcatatagacggagtgatgcttagaagccgccaacataggcagtacctacaataaccaacaggataaataaaacaacgatcaaagcgaaagagctgattccagaatatcctgacatgagcttcacctccatattgtctataccatacaatatgtaaaagaagctgctttgtaagggatattagtggacaagagaaaaaagaggcggtgtcctatgagagtaagactccggcgaaaaattcgtcatacagtgcccgcaccgcgtgtttttcctgttcttctttcactccgaacatcatgctgacttccgatgacccttgattgatcatctcgatgttgacgccggcttccgacagtgctttggatgccctggcggttgtgccgacattatggcgcatcgcttccccgacgaccataatcagcgccagattgtgcctgactgtgacttcatctgcttgaagttcctgcttcagacgggtgacgagcctgtgttccagttctgagtccatctgattgtgccgaaggatgatcgtgatgtcgtcaatgccggatggaacgtgttcatacgtcaatccttcttcctccaaaatgtgaagggctttgcggccgaaaccgatttcccggttcattaaatatttgcttatgtaaatgctgcaaaagcccgtgtcgcttgcgatgccgatgactggcccgttcgtattgtcacggctgctgacgacgcgtgttcctttcgcatccggattattcgtattcttaatttgaacggggatgccggcccgaaatgcgggaatcagcgcttcatcatgaaaaacggaaaatccggcataggagagctcacgcatttcccgatacgtcagttcgttaatttctttcggatgccgcacgattgacgggttgacggaatagacggcgtccacatcagtaaagttttcgtacaggtcggcttttaagccgctggcgagaatggagccggtaatatcagaaccgctccgggaaaacgtcacaatctcatgctccttcgtgtaaccgaaaaatcccggaaaaatgatcaagccttcacggtttcttagacggtacaaatgaccataagactcagggagcacctgcgcgcttccgggttcattcgtcacaaacagccccgcttctttcggacttacgtattccgctttcacgccctgccgtcggaagtaggctgcgatcagcttcgcgttgttgtcctcgccgctcgccttcaccgcatccatatattgttcgggattggttttacagctgtttaaaagagcgaataggtcactgcggattctttctataatagagaaatccaggttcagctcacgcgcgatggcggcgtaccgttcaatgaccgtttcggcaagctcgggcgctgcacctttttgcaaataatgctccgcacagcggattaacagatccgtcacctttgtatcgtccgagaagcgttttcccggtgccgatacgacgacggctttccgcgcgggatcagccgtcacgatttgaaacactttctcaagctgggctcctgacgcaagagagctgcctccgaattttacaactttcatgatttacatcccctaatatttaaattttctcacaaatttaatttttattatctctctttcaaacatgtaaatcaaggattttttctacttgggaagaacatttgtattttcgtggaggaattttgccgctgtttgtcagatttgtttccctcaagcgtgtcatcatgtgcaaaaaatgataagcagccaaatgtaggttatagaaaatcctgcaaattcttgatagactgattgtaagacaatttagtgtacggcccgcggatgaccgcttttgaaagcaaaactgtattgactgcgcttggaaagatgataagattataattgtcgttgataatgataatcattacgagtgggatatatgggagttgtttggcaatcagtcataccgtttgtgatgggtgcagggaggcagcatgaagctacgttacttacttttgctactggcggttttggcgtgtacttctatatttatcggtgtagaagatttgtcgccgctggatatttttcatttaaataaagaacaggcgggtacattgtttgacagccggctgccgcgtttggtgagcattatcatcgccggcatgagcctgagcatctgcggattaatcatgcagcagatcagccggaataaatttgtatcgccgacgactgcgggaacgatggattgggcaaggctcggaatcttgatttcattaatgctttttacgtcagcgagtccgcttgtgaaaatgtctatcgctttcgttttcgcgttggcgggaaatttccttttcatgaaaatcctcgagagaatcaagttcaatgatgcgatttttattcctctcgtcggtttaatgcttgggaacatcgtcagctcaatcgccacgtttatcgcatataaatatgacctgatccaaaacctgtcgtcttggctgcagggagatttctcactggtcgtcaaaggccggtatgagcttttatatctgagtatcccgcttttgatcatcgcttatgtgtatgcggataaatttacggtggcgggaatgggagagagcttttccgtcaatctcggcctgaaatacaaacgcgtcgtcaatatcggtctgattatcgtgtcgctcatcgcttcactggtgatcctgaccgtcgggatgctgccgtttctcggtttgatcattcccaatatggtgtcgatttacaaaggggacaacctgaggagcagcctgcctcacaccgctctgctgggcgctgtttttgtgctgttttgcgacattttgggaagggtgatcatcttcccgtacgaaatttccatcggcctgatggtcggtgttatcggcagcggcatcttcctgtatatgctgttaaggagaaaagcatatgagtcataataaaaaaattacgctgctggcggcgctcgccatgatatgtatcggattcttcctgttctacggactgggcaattgggaatactccctgccgagacgatgcttcaaagtgcttgccatgatgctcaccggaggagcgatcgcgttttcgacggtcatcttccagacgattacaaataaccgcatactgacaccgggcattttaggcctcgattccctgtatatgctcattcagaccgtcatcgtgttcctgttcggttcaatgaatatcgtcatgatgaacaaaaatcttaatttcgtcatctccgtcgggctgatggtgctcttgtcactcgttttgtatcagctcatgtttaaaggcgaggggcggaacgtgtttttccttctgcttgtcggcgtcgtgttcggcacgctgttcaacagtctgtcatcctttatgcagatgctgattgatccgaatgagttccaggttgttcaggacaaaatgtttgccagctttaacaatatcaacaccgatcttttatggtttgccggtgctgtctttcttctgacgggcatttatgtctggcggttcacgcggttttttgatgtgctgtcgctcggcagggagcacgccgtcaacctggggattgattacgataagcttgtgaaacagatgctcattgtcgtcgccattcttgtgtctgtctctacggctcttgtcgggccgattatgtttttaggactgcttgtcgtcaatctggcgagagagtttttaaaaacctacaggcacacgtatttaatcgcgggttctgtcctgatcagcatcgtcgcgctcgtcgggggccagttcgtcgtggagaaagtgttcacgttttccacgacgctgagcgtcatcattaattttgccggcgggatttattttatctatctgctgttaaaggagaataaatcatggtagaggtcaaaaatgtaagcaaacaatacggagggaaaaccgtccttgagaaaacgtctctatccattcaaaagggcaggctcacctcatttatcggtccgaacggcgcgggaaaaagcacgctgctgtctatcatgagccggctgattaagacggattccggggaaattacggtcgacgggcaagagatcggggcctgcaaaagcaacgatctggcaaaaaaaatcagcatcctgaagcagacgaaccaaatcaatatcaggctgacgattaaagacctggtcagcttcggcagatttccgtattcccaggggaaactgacggatgaagattgggtgcatatcaaccaggccctcagttatatgaagctggatgaattaaaggataaatacctcgatcagctcagcggaggccagtgccagagggcgtttatcgcgatgatcatcgctcaggatacggactatatttttctcgatgagccgctgaacaatttagatatgaagcattccgttgaaatgatgaagctgttgaagcggcttgtggaagacttcggaaaaacggtcgtcgtagtgattcacgatatcaacttcgcatccgtatattcagaccatatcgtcgcactgaaaaacggccggatcgtcaaagaagggcctgcggaggagatcattgaaacctccgtgcttgaagatatttatgatatgaccatcccgattcaagagattgacagtcagcggatcggtgtgtacttttcttaaaaaccagatgaggtgaaagtcatgaaaaaattcgcattgctaatcattgcactcgttacgatttttgttgtttctgcatgcggaaacggggacaaaacatcaggcaaatcaaaagaaacaatcacaatcaaagatgacctgaacaaagaaggcgtcaaagtgccgaagaatccgaaaaaagtcgtcgtattcaacttcggaatgctggatacgatggatgaactcggtttacaggatcacgtggcgggacttccgaaacaaaaccttccaaaatacttatcttcatataaaagtgataaatacgccaataccggcggtttaaaagaaccggattttgaaaaagtcgcggatattgatccggatttaatcattatcgcccacagacaatctgattcttttaaagagttctcaaaaatcgcgcccacgatttatcttgatgatgactatacaaactacgttgacagattcaagcacaacaccgaagtgattggcaaaatcttcaacaaagaaaatgaagtgaaagataagcttgcgaaaattgacaaatccattgcggatctgaagaaaaagacaagcagcacggataaaaacgggttagtggtgatggcgaacgacggcaaaatcagcgcgttcggatctaaatcaagatacggcttcattcatgatgtgttcggcgtcaaaccggctgacaaaaacatcgaagcctcattgcacggacaaagcatttcctatgaatatatcgccaaaacaaaccctgattacatgtttgtcgttgaccgcggaacagcgatcggcacaaaatcttcaacaaaacaagtggttgaaaatgattatgtaaaatcggtgaaagccgtgaaaaacaaccatgttgtctaccttgattcagctacatggtatttatcaggaggcggcctggaatccatggcgcaaatggtgaaagaagtaaaagacggaatcgagaagtaaaaaaagaacccggtcacatacgtgatcgggttctttttggtttaccgcgtaacggcctgctgctgctcgggctgacgcggttttttcttcaatataaaagataggaggaagccggccagcgcgatgcaggcggctacgacaaatgccgcattcatgccgtgcagggcggcgtttgccggagttgtcgcatttgcgtgcgcggcctggctgctcatcacggaaactagcagcgccgtaccgatagaaccgccgacttggcggacggtattgttcatggctgtgccgtgcggaattaagtggcgcggcagggcgttgattcccgctgtcgtcaccggcatcataatcatggctgttcccaaaagccgcgcggtataaacgacgacaatccaaatgagagacgtcgagtccgtcagattcataaacggcagggacgtgagcaggatgatgaagaatccggtcatcgcaaggccctttccgccgattttgtcaaacacccggccgataaacggagacatcatccccatcacaatcgcgcccggcaaaagcattaatccggtatcaaacgcggatacgccccggactttttgcgtgtaaagcgggagaatagtttccgttccgatcagcagcgcgaaaacaagcgttccgagcagggtggtcaggctgaaaatcccgaaagaaaacacgcggaattccagcatcggttttttgagcttcatctgtcttgcgataaagaaaatcagcgcgaccgctccgacaagcagcgaagtcagcacttcagcactggtccaccctgatgaaccggcgcttgagaagccgtaaagcagaccgccgaatccgagggtcgataagaccacggataaaatatcaatctgtgtttctcgtaatgtcgtgacgtttttcatcagaataatcgctaaaagcaaatcgatgactgcgatcgggaagatgatataaaacaaagaccgccaagagaatgcttcgaccgcccatccggaaagcgtcgggccgatcgccggcgcgaacgaaataactaagccgaccatacccatggcgcggccgcgcttttccatcgggaaaatcgtgagaaataccgtctgcatgagcggcagcataattccggcaccggccgcctggataatccgggccgtcaagagcaccggaaagttcggtgcgaatgcgccgacaatggtgcccgccgtgaaaatactcatggcggaaatcaagagggtgcggcttgtgaatttctctattaaaaacgcggtaatcggaatcaaaatcccgttcgtcagcataaacgatgttgtcagccattgcgctttgttggcgtctatattgaagtcattcataatgtgcggcagcgccgtgataagcagtgtctggttcaaaatggcgacgaacgctcccgccaaaagaatcccgacaatgacagagcggttgtatggtgcagttttaatactcttattcaagctgattccttctttctttatagtttgagcaatgttttaatggctgcaagcggctggtgcagcggtccggcctgctccaaataaccgatgagcgctttgatgagaaaatcccgcggctgtttgtccgctgattctttctccagcatagccgccgcggaagcgagtcctgcggcgtcatatttttcctccggaagggctgagacggcttctttcagttccttcaggctttcagccagcaatacggttttgtctttcggctcaaatgaggtagcggaggcgatataaaggtcaatcatctcctgaggcaaagcggtctcggttgtcctgttttcgacgatgagattgaggtggcggatgataaactccgtgagcggctccagggcgagcggttctttttccagcttaatcagcgtgatgcattctctcaggagcccctgcaggacgatcaccagctcccatacataaggaataatgtcttcgccgtacgtctgaatcagtgaatcgcgatgccagcagataaaggtggagcgggccctgtgaatatgccgttttacccgctcattaatggaagaggggcttccgtacatcagcatattaaaaaactgctgattgcgcctgaagccttcaagctcagccatcagttttttggcaaaccgttcctcaggggagaggcttgtttcttcattcaataatgaagcggcggctaccatctgtttctggttaaagtcgagcagctccaacagcaggtcttcctttgattcaaacagcttatataaagatgctttggagactttgcactcctctgcgatcgcctgcatcgaaaccgacgaaaagcttttcccggaaaaaagctttcttgccgccagcagaatatccgttttcttatcattcataagcccagattccttctttcgtcacaatagaaaacccatcggttcacagaaaaccaatgagtatatgatgaaaatattaacaaaaatttttacacagtgtcaacgcttttgtttgagaaacagaaaaaacctgccggagtgttccggcaggctgatccgcttatttatccgtcttaaacccttgtttttcaagcatttcacgaatgtgaggataataaagctgcttatagtaggaggtgatgccttgtgaccagtttctcgtttcctgtccgtcggtgcgttttttcatgtattcggacatctgcttgtcataggcctcgatatgtgttcttaaatcttcttcttgatacgtttcatgatgcagaacggctgcttgcggcagacgcggttttttcgcggagcggtctgccggatggccgatgacgagaccggaaaccgggaaaacgtatttcgggagtttcagcaattcaatgagttcgtccggcttgccgcgcacggcgccgatcggcacagtgccgagtcccattgattcagccgcagccgttgccgtacccagcgcaatcccgacatctacggctccgactaagacggactctaaaccgttcgtgatctcaagcggtgtatcattatactcttcaagcgcaattttggcacggttaaaatcagcgcagaataaaaggaaaaccggcgcttggtcaatccacggctggccgcccgccaattcggatatttttttcttccgttccttatctttcaccgcaataacggtaaattgctggccgttaatggaagtcggcgctgcctgagcggcttggatgataaggtccagctgttcatccgatacgggttcatctgtgtagctgcggatggaacggtggtctgttaataattgaaggacttcgttcatgtcattcatcctttcgttactctgacagttctgtgcggacgacgtcaagcggcgcactcagcacttcttttgcttttgccacgaatccttggaaatggtcagttgcgttgtggaatttcatcgcttcttcatctttccattgttcaagcatgacgaatgtattttcctcaccgactttttcgaaaaggtcgtattgcacatttccttcttccgcgcgtgaatgctgaacaagtgattgcgcttctcctaaaaattcctcgcgtttatccgcttttactttcatgtaagcctgtaagacgatcatggttattcctcctgattgggttaatttgttatagttcgaatattatcgaactaactgtaacatgtttcgctgcgaatggtaaaggaaaaaccctcaccgcctaaattgtcacccgccgatgatctgtgttacatttgactcatgaacattccaaaccatcctgaaaccgaacgcttacagctgacaaaggttcttcatgctctgagtgatccgctccgcttagagctggtcaaacaattggcggaaacaacagaaaaaacgtgcggaacctgcgctgatgtccgggtcgctaaatcaacgctgtcccatcacttcaaagtgctgcgggaagcggggatcgcccaggtgcgcatagacgggaagcaccgctattattccctgcgcaaagatgatttacaagcggcgtttcccggcctgctggaggcgattttgcagacagagccggaccgctggtaaataagtccccgaattccgggggtttttttatgcgccgaaaaccgcccggtaaagcctgtagacgccttcttgaatatcgctctccttcaggcgggcgaaccccaggataagctgcggtttgtttgaatcgcctcccgctctcagacggaaccggctcatcgcaaacagatcgagctgttctgcatccgcccgtgccaatatctctttttctgaacgggcgcagtcaaactcagtgacaaaatgaagccccgcattggcgccctttacactgattctttcaccgaatgtttcttccaaagccgaaatgaggcgttcccgcatgttcttataatgctgcttcatctttttaatatgtttctgatattcacctgattcgataaattctttcagcgcgagctgggcaagcgtgctgcacgtatgcaggtcatacgttctctctttgaaagtccgcaaaagcccgggcggcagaaccatatagctgatgcgcagacctgggaaaagggattttgaaaaggtccccatgtagatgacattttgaaaccggtcaaggctttgaagcgccggtatcgtatcggcgtcatatttaaattcactgtcataatcatcttcaatgatgaagcggccgttctgttcggcggcccagtttaaaagctgaatccgccgggaagccggcatgatcacgcctgaggggaattgatgggaaggcgtggtgatcaatacagagggccggcgtttttcgatttcgttcatggacatgcctttttcatcaaggctgatcgtcgccgtctttttcccgaggttttgcagcagccggtacatcctcatatatcccgggttctccatggcgtagagcgcgtcttttggcaacagttccgtcagcagctgcaccagcaattgcgtgcccgctccgagcacgatttgttccgggcggcatgtaacgccccttgtcagggaaataagccgcgaaattgtttcacggacttcatataaaccttgcggatggacgagttctccgagtgtatgaaatgaacgggcggctgctttctgctcacagcggaaccagcttttcagggggaaatgcgccgtatccacgctcatatgagaaaacgaaatccagccgcttttatccgtctcccgctctttcaaattatcaggcaatgagagcgaaggcgtttcttcatgataaaccgtatcaatttcctccacgaaaaagccttttctttcaaccgcatataaataaccttctgaaagcagctgctgataagctgaattcactgaattcacgctgaccttcagcgtctcggcaagctcccgtttagacggcacctttgtatgaggcatcaggctgcgcttcaaaacggccgcttttatgtgctgatagatctgctgatagatataatccgccgtttccgaatggtcaatggaaatcgtcagcatccagactctgcccctttctgataccatggataaattgattttggtacttttcatcataccaaaaagaagtcagaatgataagaaaacaatgcagggggatggaatctatgagtcgaacagcatcatcggaagtgacaactgcccagtggcagcaaaaacgggatcaattcgtttccaagggggtcggcaacggaaaccgcagcatggcggtaaaaggggaaggggcgcttttgtacgatttggacggcagacgattcattgattttgccggagcgatcggaacgctgaatgtcggccattcccatccgaaagtggtggaggccgtgaagaaacaggcggaggatctgattcacccgggatttaacgtcatgatgtatccgtcttatattgagctggccgaaaaactttgcgcccttgcgccgggagatcatgcgaaaaaagcgatttttctcaattcgggggcggaagcggtggaaaacgccgtgaaaatcgccagaaaatacacgaagcgccaggctgtcgtgtcatttacaagagggttccacggccgcacgaacatgacgatgagcatgacgagcaaggtgaagccttataaattcggtttcggcccgtttgcctcagaggtgtatcaggcgccgtttccttactattatcaaaagccggccggcatgagcgacgagcagtatgacgactttatcatcagcgcttttgaggatttctttatcgccgcagttgcaccggaaaccgtcgcctgtgtcgtcatggagccggttcagggagaaggcggcttcatcattccgtcaaaacgtttcgtccagcacgtcgccgctttttgtcaaaaacacggcatcgtttttgtggcggatgagattcagaccggttttgccagaacgggaacgtattttgcgattgagcatttcggagccgttccggatttgatcaccgtatccaaatcacttgcggccggattgccgctgagcggcgtcatcggccgggcggaaatgcttgatgccgccgcgccgggggaactcgggggcacatatgcgggaagcccgctcggctgtgcggctgcgcttgcggtcttggatattattgaagaagaagggctgaatcagcgttccgaggagatcggccggatcatcgagcatcaagcgctcgagtggaaaaaagagcatgcctgtatcggagaagtgcgcagactcggcgcgatggcggccatcgaaattgtcaaagatccggacacgcgggaaccggacaaagcaaaagccgcggcgatcgccaaaacggcgaacgagaacggactgctgctgctgacggccggcattaacggcaacattatcagattcctgacgccgcttgtcgtgacggatgagcagctcaaagaaggcctttccattatcgaagcagctctgtgagttcaattattggaatgccggcggatgtgtctgctatcatgaaagtgtgagatacatcaaccagcattcaatggctttactatagcagagaaaggaatgttcaatatgccagaacaattaacagtgtacaacccggcaacgggagaggcgatcgaaagcatcccccagcagacggccgaagatgttgaaaaagcgattgaacgttcacatcaagcgtttcaatcatggtccaaaacatcagcgggagaacgtgcctcacttttgagaaaatggtatgagctgattgttgaaaataaagaagaacttgcggaattaattacgaaagaaaacggcaaaccgtacgaagaagcggtcggagaagttttatacggcgccggctatattgaatggttcgccgaagaagcaaaacggatttacggcagaacagtacctgcgccgacaacgggcaaacggattgtcgtcacccgtcaggcggtcggcccggtagccgcgatcacgccgtggaatttcccgaatgcgatgattacaagaaaagccgcgcccgctttggcggcaggctgtacgttcatcatcaaaccggcggaggatacgccgctttccgcttacgcccttgcgcgtctcgcatatgaagcgggaattccgaaggacgtgctgcaagtggtaatcggtgacggagccgaaatcggaaacgtcttcaccagcagcccgaaaatccgcaaaattacctttaccggctcaacgcctgtcggcaaaatcctgatgaaaaacagcgccgacaccgtaaaacatatgtcaatggagcttggcggacatgcgccgctgatcgtggatgaagacgctgatcttgatctggcagtagcccaaacaatggcctctaaattcagaaatgccggccaaacctgcgtctgtgcgaaccggctgatcgtacacgaatccgtaaaagacgagtttgcgaaaaaactgagtgaagaagctgcgaaactcaaagtcggaaacggtcttgaaaaaggcgtaaacgtcggccctgtcatcaacaaaaaaggcttcgataaaatcgtcggccaaattaatgacgccgtggaaaaaggcgcaaaagtgctcacgggcggaacgtatgaccaaaacgatgaaaaaggatgctatttcgtgacaccgaccgtgctgtcaaatgtagatacatccatgaacatcatgcatgaagaaacattcggcccggttgcgccgatcgttacgttctcagatattgatgaagcgatcaagcttgcgaacgatacgccgttcgggcttgcggcttatttcttcacagaaaactaccgccgcggcatctatatttctgaacagcttgaatacggcatcatcggctggaatgacggcggtccgtccgcggttcaagcgccgttcggaggaatgaaagaaagcggcatcggccgtgaaggcggtacggaaggcattgagccgtacctggaaaccaaatacatgtctatcggactttaatgagccgaaaagaaagccccgcttctaagcggggctgtttttattgagcagtctgccggtgaatatcgccggcaggcttttttgatctagcgggaataatcggttcgattccagacaaaataacagcaaatacgattgaaagaaggtcgccatcatggatatattactggctcttctcccggctttattttgggggagcatcgtgttatttaacgtcaaattaggcggcgggccttacagccagacgctgggaacgacaatcggggcgctcatcgtttcgtttgtgttgtatctgtttgtccacccggtgctgtctgggcgcatttttattgtcggcatcatctcggggctgttttggtcgctcggccaaagcaatcagcttaaaagcatacagctgatgggcgtttcaaaaacgatgccgatatcaacgggaatgcagctcgtctcgacttctttgttcggtgtgatcgtattcaaagaatggtcaaccccgatcgcgattacgctgggtattctcgcccttatttttatcatcatcgggattgtgctcacatctttagaagataaaaaggggcgggcggacggagaaccgggaaacttaaaaaaaggcattgtcatcctgctgatctccacgctcggttatttggtctatgtcgttgtggcccggctgttcggcgtatccggatggtcagcgctcctgccgcaggcgatcgggatggtcatcggcggactgctcctgacgtacaagcataaaccgtttaataagtacgccctcaagaacattctgccgggaatcatctgggcgctcgggaatatgtttctgttcatctcacagccgcgcgttggagttgcgacaagtttttccctctctcaaatggggatcgtcatcagcacgctcggcggaatctttattctccgtgagagcaaaacgaagcgtcagctggtcgccattgccatcgggattatcctgatcattgtggccgcggtattcttaggcgttgcgaaatcaaattcataacaaatgcaggaggtttgaacatgtacacggatttaaaaggaaaagtcgttgccattacgggagcttcatcaggattaggaaaagcgatggcgatccgcttcggacaggagcaggcgaaagtcgtggttaactactatagtaatgaaaaagacgcccaaaccgttaaagaagagattcaaaaagcgggaggcgaagcggtcatcgttcaaggagacgtcacaaaagaagaagatgtcaaaaacatcgtgcagaccgcggtgaaggaattcgggacattggatgtcatgatcaataacgccggcatggaaaatccggttcagtcacatgaaatgccgcttaaagactggaacaaagtcatcaataccaatctgaccggcgctttcttaggaagccgcgaagccattaaatattacgtagagaatgatattcaaggaaacgtcattaacatgtcaagcgtacatgaaatgattccatggcctctgtttgttcactacgcggcgagtaaaggcggcatcaaattgatgacggaaacgctggcgcttgagtacgcgccgaagcgcatccgtgtcaacaatatcggaccgggagccatcaatacgccgatcaacgcggaaaaatttgcggatcccgttcagaaaaaagatgtggaaagcatgattccgatgggatatatcggtgagccggaagaaatcgcggctgtcgccgtctggcttgcttcaaaggaatcaagctacgtaaccggcattacgctgtttgctgacgggggaatgaccaaatatccgtcattccaggcaggccgcggataagaaaaaaagcgatcgcaggctctttagagccggatcgctttttgcttacgcgcgttttttctttacaagcgccgcgatggaaaggataatcgccgcagctgacagaacgattgctgcaatatcaagcgctgatacgccggatttgctttcttcgtttgactgttcagctccgtgcgcatccgtcacgctggccgatttcgtgattttcgtaatcgagtgaggcgtgtcggctttctcatcacccgtccattctacaatgctgccgtctttgtaatattggtaagcgtcccaagcggcatctccgctcttttcaggatttttcgcaacgaacgtgaactgctggaattggccgggctggatgccgccgtcctttgcttcccaagtgacggagaccgctttgtcatcatgtttggatacggatgttttccagcccggaatcggctgatattgctgaaattcaacgccggcgggcactttcagcacgactttcgttgtcggctcattcttttccacaggcactttcatcgtgtacgtttcccaagaaccagcggcggattccgccggtttgactgagacgtgggcgcttgctgccgccgtaaaaccgacgagtgacagggtcacggcggatatgaataataaagccttttttttcaacatgagatacactccttagtttgtcgttgagaatatttggttgatttcattaaaatcgtttgtcagcccgtggactttgatcttccagtttcccttttcggtgatggacaggttggcggcttcgaatgtgccttccttcgtcttcttcaaatcaaaggtgctttcatgctgtttgccgctgaagcccgtctggtaaacagtgaccgtaaattgctgaatgtcttttaccaagctgccgttgtgatcggtgacaatgacttgaaattcatttttacccggctggttcggcgtaatgtgcaaggacagggtttccccgtttccgatcgtttctgagccgttaaaaggcaatggcgcaggcggcggcgggctgggcaggcttgtgaagacggcggttgtaaataataccgcgatgcctagtgcccattcagcctttatcgttgcgctgatgctcctttttctgctgaacttcgtcatccatacgtgaacagcgccgagcgcaagcatgatgacaaacagtccgattttcaaaaggagcgtcttaccgtaagcggtgtgaaagagtgaatcaaacgtgcggataatgaaaaatccgttcagcacacctgaaaataacagcacaccgacagaggcgaacgcccaaggagaaaaccgtctgaccgtttcccaagcgatggttttatcgggttttctccactctgatgaaagaagcagcacaagcgcggcgataccgcccatccatacagaagcggccgataaatggagaaagtccatcgcgatgccgaccgctttttcgtcgataaccgccgcatgcccggcgaatgcttttgccaaaagcgaagcgaagaagaacaacagcggcgccgtccagtacgcaaatgaccggaatgctttcttcttcaacagcgggatcatggacagggcgagcaggataaataagctgatctggatcatccagacgtacccgcctgccgttttcagaagcgtttcttttacatagtccggctggaacgcggcgctccaagcgccgcccgcgttttctttcgtctggatcgggagctggcagataagcgcgagtcccgttacacataaagaaatcacgagcagctttacagttcgttttgcttttgatgaatctttattatttctgtaccaaaacagatggaaaaaagccgtgccgataaacagggagagagcggtgtacaaaataccgcggtcgatggccgcttcgggatgaagcgccgcttgcgatgatgtctgctcctgaagttctccgccggcttgtccgatactgaaagggatgacgccggataccggatgtccgtcggccgataccgcgttccattccgctctgtaaatatcatgcggcaggttttttttcaatgccgcggtcatgatgcgggcatcatttttttgaatcaccgttttgcccgcatcgacccgttcgccggatgaattatagaccttaatggagtggaagccttcttcaatctgttcattaaactcaatttcaatctgcttcggcgcttgttttaattcgctgttctcacccggatttgagtttgtgatgtaggcgtgggcgaagcttgttttcggaatcaaaacaaggaacagcaaaaagatgagccagcgtttgttctgtctcatggatgatgacaccgccttccggttggttgttgttatgtcttgctgcaggtgcatcccttctgcctgtcgtgtaagatgatgtccgccgcctcgtcaaaggtgcaaatgaccccgccgaatcctttttgaaaccgttctgcgtaatcaagcgttgagaagggaatcgcctgaggccggcagcagtgaaggtcaatatcggcatgggctaaaaagtatgcggaagcggccgtcagcgtcgtctggagaagaaaatctttacaaatgacgtgggacacttcttcctttttatcctcataccgcaaaatcgcgcaatgaatgcagcacatctgctcaacggcttgtgaaacggtaataagctgaacagaatacgaatgctgaatcggccgcaggcaatagccgcattgattggcgcttcgttctgaaacgggagggagcgtaatgccgccgggtgtccggataatccggtttgcatccgccagctgattgacgtctctgtacacggtcatctcggagacgccgaatctctcgcttatgtcagagattttcagcgcgccctcttctttcagccattcaagcaaggtttgctgtctgtgaatcggaagcaattctgcatcctcctttttatgatgcgaatgagtgatgaacctccctctaagagtagatgttttcacaaatgcacacaagagcctgatgataaaatatgtgaaaaaatgttgaacaatcacaaatgtaaaagacgtagtcagactctgttataatagaagggttgaatggaggaataaacatgaaagaaacgacctgcccgaactgcggcaagccgattacaggcgacatggtcagatcatccatgatcccgtgccagtttcagtgcgggcattgccatgtgaaattgcgtgaatataaagtatcagctccgattatggctgcggccattgcgatcacggtgcttttgatttatcttgtgcagatggccagaaccgccgtcatgccgatgtttccggcagcgcggtatgtgccggccgccattttcgcgctcgtatgtgcgtatccggtgtttattatcagtgagcggctcattgccaaactcgtcgtcacaaaaggacacattatatacagaaagcggtaagacacctttgatgaggtgtcttttttttgttaaggagttgtcacagtctctgtgccaaactcctctttacttttcattgaatggggattgtaagcgttttatgatgaagacacaggggagagagagaaaccccgtgtcttatttattttcatctgaaggcaagcaaacagggagggaatgaacatgcagcaagaacagcaagctggcatgaaagtgaagatacagcggttcggcagttatttaagcggtatgatcatgccgaatatcggcgcatttatcgcatggggaattatcaccgcgctgtttatacctaaggggtggtttccgaatccgcagctgaatacattggtaagcccgatgattacgtatcttctgccgcttttaatcgcatatacgggcggaaaaatgatttacgatcaccgcgggggagtcgtcggagcgacggcggccatcggagtcattgtcggagcggacattccgatgttcttaggggcaatgattatggggcctttgggcggttatctcattaaacaattagaccgtgtgtttaaagataaagtcagacagggttttgaaatgctgatcaacaacttcacggcgggaattatcggagctgtgctcacgattatcgcgttttatgcgatcggcccggttgtcctgtctctaaacaaattgctggcggcgggtgtggaagtcattgtccacgcgaatttgctgccgattgcaagcgttttcgtagaaccggcgaaagtcctgttcctgaataacgcgatcaaccacggcattttaagtccgatcggaatcgagcaggccgccaaagcgggtaaatccattctgttcttagtggaagcgaaccccgggccgggactcggtattttactggcatatatgttctttgggaaaggctcttcaagatcgacggccccgggagcggcgatcattcatttcttcggggggattcatgaaatctatttcccttacattttaatgaaaccgatgctgatcctcgcggcgatcgccgggggagcgagcggactgcttacattctcgatctttaacgcgggtcttgtcgcggcatcatctccgggaagcatcatcgccattttggcgctgacgccgaaaggaagctacctcggcgtgctggcgggcgtcatcgttgccgcggccgtatcgtttatcgtctcggcgcttattctgaaatcgtctaaagcgggcgaagaagatttgacagccgcggcggaaaaaatgcaggaaatgaaaggcaggaaaagtgaagcggcggccgcgttggcagacaaagaggaagagccggaaaacagcgccgctgatatttccgccgaccaagtcagccgcattatcttcgcgtgtgacgcgggtatgggatcgagcgcaatgggcgcctccattttaagaaacaaagtgaaaaaagcagacctggatattgatgtgacaaatacgtcgatcaataatctgccgaatgacgcggatatcgtcattacgcataaggacctgactgaccgcgcgaaagcgaagctgccgcaggcggtgcacatttcggttgataatttcttgaacagcccgaaatacgatgaactgattgaaaagcttaaaaactaatcaaacagaaagagggattttcatcatggaagtattggctaaagcgaacatcaaactgaaccagacggtgaactcaaaggaggatgccatccgcctcgcgggacagacattgattgataacggctacgtgaagaacggctatgtggaaaaaatgttcgaacgtgaagaaacatcatccacgtttatggggaatttcatcgcgatcccgcacggcacggaagatgcaaaggatgaggtgcttcattcaggcatttccgtcatccagattccggacggtgtggaatacggtgaaggcaatacggcaaaggtcgttttcggtatcgccggaaaaaacaatgaacacttagacattctgtcaaacatcgccatcatctgctcagaggaagaaaacatcgaacggctgatcagtgcaaagacggaagaagaactggccgctattttcagcgaggtgaactgacatgattgcccttcatttcggagcgggaaacatcgggcggggctttatcggcgccctgctccatcattccggctatgaggtagttttcgctgatgtgaatgaaacgatggtcagccttctcaatgaaaagaaggaatataccgtggagcttgccgacggcggccggcagacagaaatcatcggccccgtttcagccatcaacagcgcggtgcaagaacaagagctgtacaggctgatcaatgaagcggcgatcattacgacggcggtgggcccgaacgttctcagactcatcgccccgtccatcgcggaagggctgaagcgcaaaacgtcctctgagcctctcaatatcattgcctgtgaaaatatgatcggcggcagcagttttctgaaaaaagaagttttcggacatttgacggaagcggagcgggaactcgtgaaccggacggtcggcttcccggattctgcggtggatcggatcgtgccgattcaccaccatgaagatccgctgaaagtatccgtagaaccgttttttgaatgggtcatagacagaaccggctttgccggcggccagccggtactggaaggcgcgttgtttacggatgatcttacgcctttcatcgagagaaagctgtttaccgtcaataccggtcatgccgttacggcgtacgtcggctatcagcgcggattaaaaaccgtcaaagaggccatcggccatccggaaatccggcgtgtcgtgtacgatgcactttcagaaacgggcgagtacttagtgaaagcgtacggctttaagcaatccgaacacgagcagtacatgaaaaaaatcatcggccgctttgaaaatgaatacatcacggatgatgtgacgagggtcgccagatcaccgctcagaaaactcggagcgaatgacagattagtagggccggccaaaaaaataaaagaaccgaacgcgctggcagaaggcatcgccgccgccctgcgctttgactatcaggatgatccggaagcggttgagctgcaaaagcttatcgcggaaaaaggcacgagccgcgttcttcaagacatttgcggtattcagccgcatgaaccgctgcacggcatcgtgctcaaaaagctcaatcaataaaaatgaacccgcgtcgggggacgcgggttttttcttgcgttataatgagagggaagggaggctgcgtgatgaatcagaagctattgccccatcgttttccgtttcttttgattgacggcacgacgaacagtgaagccggaaaatgggcggctgcttacaaaaacatcagtgaaaatgactggtttataactgaatcccaaagagagatgccattttcgctcgtcgttgaagcaatggcccaaacggcggcttgcgcgggaattaccggcggtgacggcctcggtctcttatccgcggtgaagaaagcggaaaggttaggtgccgctttgccgggagaccgtctggatcttttttttgaggtcacgcgaatcagacgcggttttgtgttcggccgggcgaaagcgtccgttgccgggaagcctgtggcggaagctgagctcagcatatttatccagccatcgtaaaaaaagccgcctccatcggcggctttcggacaagcgtgttattttgtatcataatctctttcactttgtgaattgtccctttggtcatgtttgtgtttttcgtcattggcgttttccttcagctcttccagcggaatcggatcggttaaatcatgatgttcaggattttcattcggtttgttcttttgttttctttctttcatcctccatcacctcaatatttcttttcctcaacgttctccccgccaaacgcaggaagcggttttttgttcctgcgggtcatatgtattaaaatagagacgactacattataaaaagtgaggtacatatatgccgatacaaagagaagacgcagatattaaactgatcgcgattgatatggacggaaccctgctcaatgacgagcagctcatcccggaggaaaaccggcgggcgatcaaggaagcggaggcgaaaggaattcacgtcgtcatcagcacaggacgcacgctgatgacctgccgcgaactggctgagtctctcgagctgtcatcctttttaatcacggcaaacggcagcgaaatctgggattccaactttgagctggttgagcgcaagcttcttcataccgatcatattcaaaaattatgggatctgaggaataagcacaacacgaatttctgggcctctaccgtcgatagagtgtggagaggggaattcccggaaacgattacggatcatcagtggctcaagttcggattcgaaatcgaggatgacgaagtgcggaatgaggtgctgaaagagctcaaggaatacaaggagctcgagatcacaaactccagtccgatcaacatcgaagtcaatgccctcggtatcaacaaagcggctgcgctggcgaaggtatcggataaactcggcttcacgatggaaaatgtgatggccatgggtgacagtctgaatgacattgccatgattgaaaaagcgggtgtcggcgtcgccatggggaatgcgcaggacattgtgaaagaaacagctgactgggtgactgatgtcaacacggaaaacggggtcgccaaagcgatccgccactgggtgttataatagaaaaaagagagagtctcagtatgagactctcttttttttgttttgtcagatttgtgactaggtcccatggtaggttttctgacaaaaggatgttcaaacctgtcagaaataaatataatgaagagaaatccaacaattcggaatagtcattccgaatagcggaatgataatcatataaaacgtttacaatacaggagggatcttatgtttcagattgacatcaattgtgatttaggagagagtttcggtgcttataaaatcggactggatgaagagattttggattatgtgacatctgcaaacatcgcctgcggctttcatgcgggtgatcccagcgtgatgcgcaaaacggttgcgcttgcggcggaaaaaggcgtgaaaatcggcgctcatcccgggctgttcgatctgcagggattcgggcggcggcagatcgcgattacgcccgaggaagcgtatgatctgacgctgtatcaaatcggcgcgctgtcagggtttttaaaagcagaaggtgtcgagatgcagcatgtgaagccgcacggcgctttatataatatggccgccgtcaatcccggcctgtcagaagccatcgctcaggcggtctgtcattttgatcccgggcttattcttttcgggctttccggaagcgagctgattaaagcgggagatcgaatcggactgaggacggcaagcgaagtgtttgcggaccgcacctatcaggaagatggcacgctgacgccgcgttcagagccggatgcgctgattcaggatgacaaaaaagcggtcggtcaagtgattcaaatggtgaaagacagcacggtgacatcacgtaagggacaagctgtaagcctgaaagcggacacggtctgcattcacggagacggagcccacgccctcacattcgcaaaaacaatcaaaaaagaattaaaagcggcagacattcaaatcagcgcgctttcaaaagactgagcagcagagggaggaagacagcatggagcaaaagaaaaaaacagccggaaaggcttccggcaaatggtcgcttcttttaggcgcgacatttttgatggcgacatcatcaatcgggcccggctttctgacgcaaacggccacgtttaccaatacattggcggcaagcttcggatttatcattttaatttctattattttggacgttttcgcgcaaaccaatgtatggcggattatcgcggtttccggaaagcgcggccaagagattgccaatatggtgcttccgggcgccggttatgccattgcttttctggtcgtgctcggcggacttgcgtttaatatcggaaacatcggcggcgcgggtctcggtcttcaagtattattcgggatcaaaccggagatcggcgctttaatcagcgcagcggtcgcggtgctgatttttgtcataaaggaagccggaaaagtcatggaccgttttatgcagatcgccggaatcgtcatgatcgtattgactgtgtatgttgccgtaacgacggctccgccggtcggacacgccgttgtgaaaacttttatgcctgatcatatcagtgtgctggcgatcgtgacgcttgtcggcggcacggtcggcggatacattacatttgccggcggccaccgtttgcttgattcaggcatccaagggaaggaagtcctccctcaggttacgaaaagctccatcacaggcgttctgattacatcgattatgcggattgccctgtttctcgccgtgctcggcgtcgtctcaaagggcctgagcattgatcctgataatccggcggcttctgtattccggcttgcggcgggaaatgtaggctataaaattttcggcgtcatcatgtggtctgccgctatcacgtctgtcatcggcgccgcctatacatcggtatcatttttcaaatcattttcaacaaaaatagaaaagcactcacatggcgtcattatcggttttatcatcgtatccactcttatttttgttacgatcggccagcctgccaaaattctggtcgcggtcggttcgcttaacggcttaattctgccgcttgcattagcgatgattctgttgggcgcttataagaaaaaaatcgtcggcgattacaagcatccgatctggctcacgattgcaggggcgatcgtagtggttgtcatggcggttatgggcatctatacattatttacgcaaatgccgcagctatggagctgatgatatgaaaaaccatatgagtgacatgagccccgaagaagtcagacagctggtcaggaaggggcagatgaccgggccgacggcggggatggccgcttcttacgcacaagccaatctcgtcgttttgcaaaaggatctggcctttgattttctcttattctgccagcgcaatcaaaagccttgtccggtgctggatgtgacggatgcgggttcacccgttccggcaatagctgcgccgggagctgatatccggacggactttccgaaatacaggatttatcggcatggcgtgcttactgaagaggtaacggatattacgccgtattggaaggatgattatgtcgggtttttaatcggctgcagtttttcattcgagcaagcccttattaatcagcacattccaatcaggcacatcgatgagggtgtgaatgtccccatgtataaaacagacattgactgtgttcccgccggcccgttttctggaaagatggtcgtcagcatgagaccgattccggaaaggcttgcagtccgcgcggcgcaggtcacgtcacgttttcccgccgtgcacggcgcccccgtccgcatcggaaatccgcaaagcatcggtatcagcgatttgcatcagccggatttcggagatgccgtaacggtgcgggaaggtgaagttcccgtattctgggcttgcggcgttacgccccaggcggtgatcatggaagcaaagcctgacatcgtaataacacattcaccggggcacatgctgatcaccgatatacgaaatgaatcgcttgctgtcctgtaagtgagaaagaatacaacgaggtgatgacaatgatgcagtatagcggaaatacagcgcttgatatacagccgtacggtgattccgccgttatcatccgctttggcgggcacatcagcgaagaggtcaacagccgggtgcatgcggcggcagcctgtatggaagaacggccgtttccgggcttcgttgaatgtattccggcattcacaagcttaacgatcttttatgatgtgtatgccgtctcaaacataaaaaaaggcgtctctccttttgccctggtcaagaaagaagtgacagaacgtctcagccatataatgaccggccgcaaagaagagcgccgggtgatggaaatccccgtttgctacggcggtgatttcggtcccgatttagaagaggtcgctgagatgaacgatctgacctcggaagacgtcatccgcattcatactgaaggcgaatatctcgtttatatgctcggatttgcgccgggatttccgtttttaggaggaatgtctgagcggatcagagcgccgagaaaggcgtcgccaaggccgtccatcccggccggttcagtaggaatcgcgggaatgcagaccggtgtgtatccgatatccactcccggcggctggcagctgatcggcagcaccccgctccgtcttttcaggccggaagaacatccgccgagtcttttgagagcgggcgatacggtgaaattcgtccggatcacggcagaggagtacagccgcatcaaggagggagccgaatgagtatgaaagtggtaaagcccggtctcttgacgacggttcaggacacggggcggacgggatatcagaaatacggtgtgctgggaagcggggcaatggatacgatctcactgcgcatcgccaatcttcttgccggaaatcaagaaaaagaggcgggactggaaattacgctcatggggcccgggccttcctttgaattttcagaacctgcggttattgccgtcacgggagctgatttcgcccttcatattaatggggagcccgcccctctatggaaaccggttttgataaaggaaaacagcgtcgtctcattcgggccgtgcaagatggggagccgcgcttatctcgccgtcgcggggggatttgacgtgcccgccgtcatggaaagcaaaagcacgtatgtcagagcggggatcggcggtttttgcggaagagcgctgcaaaaagatgatgagctgccgctcggccgtatgacgccatgttcggaatcaatcgcgtaccgtctgagcgattctttcggacagcatggtttctcagcgcctgattggtctgtcagcagcagaggatttctgccgctgaaaaaaaatccggtcatacgagtgcttgaaggcgctcaatttcacgcttttacagaagaagcaaaattgcgttttcatcaagagtcatatacggtcacgcctcaatccgaccgaatgggctaccggctgaagggcgctccgcttgaattgcgggagccgctggagatggtatctgaggccgtgacgttcggaacagtgcaggtgccgccggacggcaatccgattattctgctggctgacagacagacgacggggggctatccgcggatggcgcatatcatatccgctgatcttcctctcgtcgcccaaacgatgccgggggaacatatcacgttccgggccgtttcgctggaggaagcggaactgctgcttttagagaaggaacagcagctgaaggagctgaaagcaaggctcaaaatggaatggctgatctgacaaaggggctaaagaccatggaaaacaaaaacaaaactgtcatcaaatcaatggaactgcttcatttgtttctgactgaaccgagcctgagcttaaatgagctggtttctctatcggaaatgccgaagacctcggttcaccggatggcaagctcgctggaggaaacgggatttctcacccgggcagcggacggccgttatcagcttggtctgatctttctacagttcggccagctcgtctctgaacgtctggacatcaggaaaatagccaaaccgattatggaagagctgtgcggcgaagtggatgaggccgttcagctgatcatgagggacggagatgaagccatttacgtcgaaaaaattgaaggcacccaaaccgtccgcctgtatacggcaatcggccgccggtcgccgctgtacgcgggagcgtgcgccagaagcattctatcgtttctgccaaaagaggagattgacacatacattcagaagacaaagcctgccgcaatcgcctcaggcacgatgacggatcgggctgaactgcttcaatccattgaaagatccttacaatcaggttatacgatcagctattcggaattagaagattacacggcggcgatcggggcgccgattttcaatcacgaaggtaaggtggctgccggaatcagcatcgccggcttcgaagcccgtttttcagaggacaggctgccgtatttaaccgaaaaggtcaaaaccgccgcacagcatatttctgagaaattgggttattgaccgagccaatttttcttcacgcgcgtacattacaatatcgatagtaacgagtggaggaaagtaaatgggacttgtttatacggcgctgggggattctttgacgacggggaggggatccgggccgttttccgccggttttgtacagcggttcgggcggatgatggcagaagatttacagacaagaaccgacgtatccatctttgccaaatcaggccttgagacgggagaaattctcgggcttatgtccttgccgtacattcagaggcggattcaggctgctgatatgattacgattacaggctgcggcaacgatttgatcgattcggttcaggcatatcagcaaacatcggacgcttcggtgttcaccagcgtgtccagtcactgccatgagaactttgaaaagatgattgccaagatcgctgccttaaaagggccgcacccgtctccttatgagatccgcgtcttcaatttatacaatcctttcccgggcatctccattgcagaaaaatggatatcctcttataatgcgcacctcagcacactcgcatcggcgccgcacgtcaaaattgccgacgtccacagcgctttcaaaggaaaaatgaatgaatatctctctcatgaccgcgtacaccccaacagcaaggggtatgaagtcatggcatgcgtcctgcgggggctcggatacggaagccttgcccgctcataaccgcgcgctccttttcatcgggagcgcgcttttcgtgctccttaaaacaaacttaaaattgtccgactttcgttctatccgcgcaaaaaatacgctagaataatgggggataaagacagaaatagaattgtgttcaaaaaatgataacagaaaggatggattgctttgctgcgcgccttaaaactgtcactcgcgatgctgattattatacttgcggccgccgcatttacgtatgcggaacatacctctgtcatacagccggttatgctcgtgtttctcggtgcggtcatgttcattcaggggctggaggaaaaacggaaagaaaacgacggctccgggaaattcaatatctataccgccgtttttgtatggtcaatctccttaatcggttttacgcttcacgcgatctgagtctgatagatcctgaaaatgctccacaacgggaaatggtgaataaaaacggtgcagtaaggctttccattcctgatattccggcgatccgcgaaagccttttgtatgatcttctaatgtctcccattccacaagcagcaaatatttatgcgtcttttccatacatttggacaaggaatgggacagataacctttcatgcccgcaataatcggctccgcccggcggaatgcctcttcgaattccccctcaagaccttcttttacatacagcatggctgcttctctgatcatctgaaattccccctttttttaatagatacattgtataagaatatggcccgtgacggcaggagaaacaaaaaaattttaaataatatgagaaaaaaatccttgccagcctgatttggtttaggagaaaataacagttggaaggcaggggaatagacagtgaaaaaagggttatacctattacttttactcgcaggaatcataggtttgatcggctgctcgaaaacggaatcggccgaagacagaatgaaagatttcgtaaaagactggaacggcggtcattacgataagatgtaccaaagcctcacccaggatgaaaagaaaaaacgatccaaaaaggattttataaagcgatatgaaaccgtttatgaacaagcaggggtcaaaaatctgaaagtcactgccgaaaaacaggacgaagacgacaagaaaaaagatgacctccagcacatcgattataaagtcagcatggatacaaaagcagggaaggtcgcttttgaaaacacggcagtcctgaaaaaagaaaaaacagacgatggagaatcgtggaacatcgactggaatccttcttttattttcaaacagctttccgatgacaaaaccgtgcagatcgcaaatgaagaaccgaagcgcggacaaatttacgacaaagacggaaaaggtctcgccgtgaataccgaggtgccggaaatcggcattatccctggaaaactcggcaaggataaagacagcgtgatcaaaaaactgtctgaaaaactggacctttctgaagacgatatcaaaagcaaattgaaccaaggctgggtaaaagacgactcctatgtcccgcttcaaaaaatcagaccggatgatgaaagcaaggtcaaaagcctgctcgcattagacggcgtgacgaaaacgaaagtcagctcccgctactatccgtacggcgaaaaagcggctcatctgaccggctatattaaaaccatcacagcggagcagctgaaaaaagcgaaagacggccaatacagcgatacttccaaaatcggcatcgccggccttgagaatgtatatgaagacaagctgcgcggcacgaccggctggaaaatttacgtcccgcaaacaggtgaggtcattgctgaaaagaaagccgaaagcgggcaggatattcatgtaacgattgatatgaaaacgcagacgaagctgtatgattctatgaaagatgacagcggagcggcagtcgccctcgaaccgcaaacgggagagaccctcgcgctcgtcagcgcaccgtcttatgacccgaacggctttattttcggctggggcggaaaagaatggaaaaagctgaatgaagataaaaacaatccgttttcagcgaaattcaacaaactttatgcgccgggatcaacgattaaaccgattgccgcggcagtcggcctgacaaacggcacattgaaagcgtcgaaaaagaaaaaaatcaccggaaaagagtggcagaaagattcaagctggggcggttaccatgtcacacgcgtatcagagcgcctgaatgaagtggatctcgaaaacgcgctgatcacatcggacaacatctactttgcgcaaaatgccatagatgccggagcggacgcgtttacaaaaggattaaaaacatttggctttgatgaagagattccgtaccaatttccgattgaaaagtcttcaatcgctaacggcaagcttgattccgagatccttctcggagatacgggctacggccaggggcagatgctgatgtctccgctgcacttagctgctgactataccgcatttgtaacagacggaaatctcgtcaaaccgacattgatcaaagacggagaaaaaacaccgcaaatctggcataagcaagtggtgtcgaaagccaatgccgaagaaatcacaaaagggctgagaggcgtcgttgaagatccgcgcggctctgcatatcagccggccgtaagcggcattaccgtagccggaaaaaccggtacagccgagctgaaaacgtctaaagaagataaagacggcaaagaaaacggctggtttgtcggttacgattataaaaagaaagacctcttgatcgcgatgatgattcaagacgtcaaaaaacgcggcggaagccattacgtcgttgaaaaagcgaaaaagcagtttcagaatcattaaatgacgatttttgcgggctgaaaggaaaatcggccgccgaagcagaatgaaacagcatgggcaattcctgaaaacagagatacaagaggctctaagaaaaagggggatttcacatgcagcgcattcaattggctgaagacctggaattttcaagagtgatacacgggctttggcgtctgaacgaatggaatgtttcagacggagagctgctgaatttgattgaatggtgtatcagccaaggcatcaccaccttcgaccatgccgatatatacggcggttatacgtgtgaaaagctgttcggcggcgctttgtccctttcgccttcaataagggagcgaatcgaaatcgtcacaaaatgcgggattgtcattgaatcaccggaacggcccggaaacaagtcgcatcattataatacgtcgaagtctcacattttagcgtcggcggagcagtcgctcttgaatctgaatacggattatctggatgtgctgctcattcacagaccggacccgcttatggacccggaggcggtggctgaagcgtttcatgcgctgaaaagctcgggaaaggtcagatatttcggagtatcgaactttaaagcgcaccagtacagaatgctcgaatcctatttggatgatccgctcatcacaaaccaaattgaaatctcggcgtacgagctggaaaatattcatgacggcacgctggatttctgtcaggaaaaacgcattccgccgatggcgtggtcaccgcttgcgggcgggagcgtctttaccggacaatcagataaggacgtccgtatccgtgccgcgcttcgttccgtacaggaagaaatcggcgccgcttccattgacgaagtcatgtacgcatggctgttcacccacccggcagacatcatgccgattgtcggcagcggaaaagagaaccgcatttccgccgcggtgcgtgcatccgcgtacaaactcagccatgatcagtggttccggatttataccggtgtccaaggctgcgatattccataaacagaacaaacgcccggaagctatcttccgggcgtttgtttatgtggtgtgcaatgtctaaaaacaagtaaggtcactttgaagtatagccgtgcggatcaagagtaacaagcgtcatggcatattatctgacacatttttctttttcaatactgtcacacggcccagtgccaaattgccatttgaaaatggttgaataatcattgaaagcgttttatattataacttacaccactttccccggcagcactccccatatgacatacttctcacaactagaaaatctggaggcgcgtttcatgtatatgacagcgagagaacaaaaattaatgaaacatctattactgcagaaccggtacgagacagtgcatgaactggcggaagctttacaagtcagcacaagaaccgttcaccgcgagttaaaaacaatcaaaccgataatggaatcattcggtctggcacttgataaacagcccggaaaaggactgaaagcggtaggaaacccggaggacaaacaaaaactcctgtcagacctgtcctatgaacagcatgaatacagcgctgaggagcggaaacttttaattctatgttcactattagagtctcaagagccgatcaagctctacagtctggcgaacgaactgcaagtgacaaacgcgacgatcagctatgacctggatgagctggagacttggattgcgcccttcggcttgacgctgatccgaaaaaggggcttcggcattcagctgacggggccggaaaatgcgaaacggaaaatcgtcggcaatctcatcgtcaaccgccttgatattcaaagctttttggaagcggttgaattgaatattaaaggaaaaccggacgatgctgaaaaaatgttcggcgtcgtaaataaagcggaacttttgaaaatggaccggctcttaattcagctcaaggaaaaaatcgcgatcgccttatctgacagctcatacatggcgcttgcggttcatttaacctttgcgatggaccggatcaggctcggagaaaccatcacgatggaggcttcggaactaaaagcgctgcagcagacgaaggagtacggctctgcgctggaaatggcaaaagagcttgaaaaagcgttcggcgtttcaattccggaagctgagatcggatatatcaccattcatttgcggagcgccaaccgcaaatacaaaacggaattcaaaccggaagacatagaggttgaaacggccttgcaaacgaagcagctgatcggcttcatttctgaaaaaattaaaattgatctgacggaaaacggttctttatacgacggtttaatcgcccatctggagcctgcgatcaaccgggtaaaagaaaatatcgacatgtacaacccgatgaccgagcaaattaaacgcgactactttctgctgtacatggccgtagaagaaggaatggaaaaattctttccggggcttcttttctctgataatgagatcgctttcatcgttcttcacttcggctccgctttggaaatcaaacgggaagaggcgaagatcaaagcgctgatcgtctgttcaagcggcatcgggtcgtccaaaatgctcgcatccaggctgaaaaaagagctttcggaaatccgttcctttgatatgtcttccctcatcgaactgaaggatcgagacatcaccgcgtatgacatgatcgtatccaccgttccgatcccgtatgaaaatattgattacgtcatggtcagtccgcttttaaacgaagaagacgctgatcaggtcaagcagtacatcaaaagaaaaattccgctgattcttgacaaaaaaagaaacggtaaaagagaagagaagcagccggagacgcctgatatgctggaagcggccggccgtatggcgcattacgcggcggttatccaaagcgtgctgcggaacttttcggtcaaatccattgattcaaacacggcgtatgagctgtttttgaaccgtatgtttgacatgctggagcaagaaggattggttcataatgcccaaaaaaccgcacagcgccttgctgagcgtgaacgacagggcggactcggcattccgggaacggcgatggccctgtaccatctcaaaaatgaagaaattgtcacgccttttttcaaaatttatgatttgacggctccatgcagtgtcaaaggcatggacggaaattccctgaccgtcgaccgcgctttggtgatgatggcgccggctgatatgcccgctgaaggggcggaaatactaagtgcggtcagctcggccatcatcgagtccgaagacagtataaaagccttccagacggaggatgaggccgatttatacaaacgtttaaacaagctgttttatcatttcattcaggagaaaggacagcggtaaacaggaagcgcacacctcatgtggggtgtgtttttttgtgcatgtatgagggtaaggggaagggaagaaactaaaaacacgggactattgtatcattcactgatggaatagttctaaaacaaaatagttttacaagttatattttttggtttaaaatgggttgcgtgagaaagaaaatctgacagagtttttttgtgatttatcattatgggagatgaaaatatggagacattacagcatctgattctgcatgacatttcaaatagcgaagagatcgaagctgtaaaaagcggtgcgcataccctgacctacgcggaatatcgaaaacgaatcaaccagcttgcacaagcgcttcttgataaaggaataaaaaaaggcgacagagtggcgatgctttgcaaaaacggccacgcggcatccattgtcatgtttgcggcactcgaaatcggcgcggtggttgtgccggtcagctggcaattaacaccttacgaaatgaaaggcattttagcagcctgtgaaccgaaagctgttttttacggcactgaatttaaagagatcatggaagaagtgcttcctgcgctggtatcttctcttaaactgaaggtcgagaccggaacagctgcggagacaacgcttcagtttgacgctttattgacaggctccggtgatacaccggatgtcgaaacggtgtctgaaaacgatacggcattgctgatgtttacctcaggtacaaccggcaatccgaaacgctgcatgatcactcacggcggcatatacaactacgtaaacgcgacattggcatacacggggagaatgcagcatgtccgcttcttagcatgccatccgaattaccatacgagcgcgattatctgccagatggtcggcacgatgagcggaacgacattcattatgacagacaatcaggaccctgtggaaaacctgaagctcatcgaaaaagaaaaaattcaaaccatcatggcgctgccagtctatttcacatacctgctgaaagcatgggaaacgcaccagactgacatgtcttctatcgtttatatgatgacgggaggcacaaaggtgccaagcagcctgatccagcagtatctcgacatcggcattccgctcatgcacggatacggaagcacggaagcgtggggcatcagctcttggaatccgcaaatgggaatggataaagccgcttccgcgggtaaaccgatggaagaagtggatgtccgcgttgtagatccggaaacaggtgaagtccttccgcaaggctcaatcggagaagtcgttgtgacaagtccgtttttattcaaaggctacgaaggtaacgaagaagcgacacgaaaagtgctgaaagacggttggttccataccggcgattccggatatgtggatgaagacggatttatctttatcaccggacgttataaagatgtcatcatctacggcggcgacaatatttatcccgaccagattgaagaggtcattcagcaagtgccgggcattctcgaaacggcggttgtcggtatccctgatccgctttacggtgaaaagccgaaagcgttcatcgtgacaaacggcagagaagacctgacagaagaagaagtgacccgattccttcaagaacgtcttgccgcctttaaaattccggaaattgagttcgtcagcgaacttccgaaaaacaaccttggaaaagtgagaaaagacgtgctccgcaaacaagcggtacgttcataattgaaaacaaaaacccggcttccagccgggtttttttcttgcgttccatgtgaaacatttttctccgaaaacgttttgaactgtctcaatcatgtttatccggaggactgccgaggtagacaagaaatatgagatcgaacaagaaggaggaacttgacatggaaaactatccgaaggaattcccggcggaatcacaaaaccgccagccgggcattgaaagcgaaatgaatccggcgcctgtttatgaatacaaagaatataaaggcgctgataaattaaaagggaaaaccgcacttatcacagggggcgacagcggtatcggacgcgccgtagcggttgcttacgcgaaggaaggcgcaaatgtcgcgatcgtctattttgatgaacacggtgatgcggaagatacaaaaaaacgagtggaagaagaaggcgtaaaatgtctgttaatccccggcgatgtcggtgaggaagacttttgcaatgaagcggttgaaaaaacggttgaagaattcgggcgtcttgatattctcgtgaataacgccgcggaacagcatccgaaagaaagcattaaagacatcacaagcgagcagcttcacagaacctttaaaacaaacttttactcacaattttatttgactaaaaaagcgattgattacatgaagccgggcagcgcgatcatcaatacgacatccattaatccttacacaggcaatccgcagctgattgactacacggctacaaaaggcgcgattaacggttttacgagatccatggcgcaagcgctcgtcaacgacggtatccgtgtcaacgccgtggcaccggggccgatctggacaccgcttattccggcgacattctcagaagaaacagtcgcttccttcggtcagactactccgatggggcgggcaggccagcctgttgagcatgtcggctgctatgtgctcttggcctcagatgaatcatcttatatgaccgggcagacgctgcatgtcaacggcggcaaatttgtaaccacataagggggctgaagcatgacgatatcgaaacatgatgtgaatgcatactatcaaaaagcgggaatcgttctgactgataatgaagtcgaagacattcaaatcatggattacggcttaggcaagcttgaggaaaccgggcttcagctgtttatttacgtgaataccgaccgctactgttcgaaagaattggtgctcttcccgcgccagacgtgtccggaacaccgccatccgccggtcggcggcgagaagggaaaacaagagacattccgctgccgctgggggaaggtgtatctctacgtggaaggcgaaaagacagagaacccaagcgtcctcccgccggaagaagacaaggaatactacaccgtctggcatgagattgtgcttgagccgggcggacaatacaccattccgccggatacgaagcattggtttcaagcgggagaagaaggggcggtcgtcacggaaatgtcatcgacaagcacggatgatcacgacattttcaccgacccgcgcatttaaggatgaggctgcacgcctcatcttttttgtatggaaaaaaatgaatttacctgtataatggctaataaaggaaagaaggtgcggtcgtgttttcctgtcaaatccgggaacatctgacgatcagattgcttgccaaagaagatacggacgaattgtattctgttatgaagcgaaatcaaaaccatctcagcgaatggctcagctgggcggaagacctggctgatatcgatacgtaccgcgatgtgatcatccccgaatggcgctataaatacgcggaagaaaatgggtttgacgccggaatttttgtgaagggccggttttgcggcatgatcagcatccataatgccgatacagccaatcaaaaagcagagatcggctactggctggatcgagagcatgaaggattcggcattatcaccgcaagctgccgggcggtcatcacccatgcatttcaggatctcggcctgaaccgcattatgatcagcgcggctgaaaaaaacacgaaaagcagggcagtggcggaacggctcggatttcagaaagaaggactgacgagagaaggcattttcgtacagggcgcctatcatgacacggtgaactacagcatgctgaagcgggaatggagcgaagatcggcagaatagcacatttcttggtttaaatgtctccccaatgtggaaaagtaacagtggagacgttaaaaaggagtgattcttcatgaatcaaaatgaaatcaaagaaaaagtgcttgaagtactggatcatcataaagtcggttcgcttgcgacggtagagcaaggcaaaccgcattcacgctacatgacatttttccatgacggcttaacgatttacacgccgacgagcaaagacactcataaagcggaagaaattgaaaacaatccgaatgttcatattctgttagggtatgactgtgaaggattcggagacgcttatgtggaagtggccggaaccgccaaactgaacaactcagccgatttaaaagaaaagctgtgggatccgaaactggaacgctggtttgacggaaaagacgatccgaacctggtgattcttgaaattgaaccgaagcagatcaagctcatgaacgcgggtgaaaaaacgccggccgagctggaactttaataaatcatttgattattcaggggcaatctgttatacttaattgctaagtgacaacatgcaaataaaaaagaaagtaaacttcttttttctgttttgatatagaagcttcaggcttcaacggacagcttgaaaaaaagctgagcttattcttttccttctgacattcgcccctaacgaagagatggaaaaaagactttttgttttacaattcacaccggcgcggcttcggagccgcagtgacgattgagaggtagggctttcgttgtcttgtgttcaagaacttccatggtgtttactttcgaagaatgattctgtcggaactgttaatacgaatcacccgcgggctaaggcgggcaaccatatattatttatttgcgtaagaaaagaataagacaaaaccgctccggacatccgggcggtttttttatgtaaacggccgaaacctcgccgcagtctgcagagtctaatcagtagaaaagatttggaggaatcatacattgcacgttattacttcacaagtactgtttatcttctgttttctgctgctgatacattcgattgaaacgcttgcctatgcaacacggctttccggcgcgagagtcggatttatcgcgtccgcactgtcattatttaatgtcatggtcatcgtgtctcgcatgtcaaacatggttcagcagccgtttaccggacatctgattgatgccgccggatcaaacgccctgtctcttgtgggcgcccagtttcgatttttaatattcggctccacggtcggaacgatgctcggcatctgtcttttgccgacattcgtcgcgttattctccagggcgattatacacttggcggacggaggaggctccgtcatgcaggtatttaaaaaaggattttcactgaacgggctgaagcatgcgcgttcttatatcagactgccgtcagtctcctatttaaaagggcttcaattccgaatgattccgaaacgcttgtttgtcattaatatggtcattacgtctatttacacgatcggtgttctgtccgctctgtacgccggccttctggcgcctgagcacagcacgaccgccgtgatggcatcaggcttaatcaacggagttgcgactatgctgttggctgtgtttgttgacccgaaagtatccgtactggcagacgatgtggcgaagggcaagcgcagctacgtctccttaaaatggacatcattgacgatggtgacatcaagggtggcgggcacgcttctcgcccagctcgtattcatccccggcgcttattatatcgcctgggtgacgaaatggatgtaacgcatgaaaaaagctcctctgcagaagaggagcttttttattgataatgtctcaggacgcgatcataaataaaattaccgaacggaataaaggccgcgataaaaccggcggctgaccatttcacatgccatttgacagtaaacgccgcatacgccagcaccgccagataaatgataaacaaaccgccgtgaatggaaccggcaatggtgacggcgagcggatgatgagcccaatacttcagcggcatcgcgataaacagcagcaccaaaagcgacattccttcaataaaccccatcgtgcgaagtctgccgatcggcgtgtgtaacatacagctccctcctgtcggacatcttttttcctctatactataagcaaagggcagtcctaatatgaccatttcgcgtcagttcctaaaaaacctttattaattcagcctgttgttcttgtcatttttcggatttctcttgataatatagccaaaagggtaaggaaggactacagtcatgaaactagataatgttgatctgagcatcattaaagagctgcagcgggacagccgcctgtccatgcgggaactgggcagaaaaatcaaattgtcagctccgtccgtcacagagcgtgtcagacagcttgaatccttcggcgtcattaagcgctatacattggacattgatcaaaaaaagatcgggcttcctgtttcctgcattgtcgaagcgacggtgaaaaacggaaaatacgatcaatttaaaacctacattcaatccattcccaacattgaattttgttttcgggtcgccggggcggcgtgttatatgctgaagatgaacgcggacagcctggaaacgatcgaacacttcatcaaccgcacctctccgtatgcccaaaccgtgacccacgtcattttctcagaaattgacacaaaaaacgtcctcgattagagagagcgtgaggaagtctgttataataacaggatgattgtgaaagaaagagaagtgaaaagcatgtcaaaaacagttgtattagctgaaaaaccttcagtcggccgggacttggcccgcgttctgaagtgtcataaaaaaggaaacggatatcttgaaggcgaccgctacatcgtcacatgggcgctcgggcatctggtaacgctcgctgaccctgaaggatacggcaaagaatttcaatcatggcggcttgaggatctgccgattattccggagcctttgaagctcgtcgtcattaaaaaaacaggaaaacagttcaatgcggtcaaagctcagcttgtccggaaagacgtcacccagatcgtaatcgctacagacgcaggacgggaaggggagcttgtggcccgctggattatcgaaaaggcaaacgtccgcaaacctattaagcggctgtggatttcctctgtgacggataaggcgattaaagaaggatttcaaaagctccgcagcggcaaagagtacgaaaacctgtatcattccgccgttgccagagcggaagcggattggatcgtcggcatcaacgcgacccgcgcgctgaccacaaaatttaacgcgcagctgtcatgcggacgcgtccagactccgacattggcgatgatcgccaagcgtgaagcggatattcaggcgttcaaacccgttccttattacggtctccgcgcggcggctgatcagatgacgctgacatggcaggataaaaaaacaaagcagacaagaacattcgatcagacggtgaccggccgtttggcaaaagatctccaaggaaagccggcggtcatttcagaattgaaaaaaacggcgaagaaaagcttcgctcccggtctttacgacttgacggaattgcagcgggacgctcataagcgcttcggtttctccgcaaaagagacgctgtccgtgcttcaaaagctgtatgaacagcataagcttgtcacttacccgcggacggattccagattcctttccgcagacatcgtgccgactttaaaagaccgtttaaacggcatggaagttaagccgtacgcacagtacgtcaatcaaatactgaagcggggcgtcaaagcacataaaggattcgtcaatgatgcgaaagtatcggatcaccatgccattattccgacagaggagccactgatcctttcaagcctcagcgacaaagaacgaaagctttacgatctgatcgccaaacgttttctcgccgtgttaatgccggcgttcgaatacgaggaaacaaaggtcacagccgatatcggcggcgaaacatttaccgcaaaagggaaaacggttcaatcgcctggctggaaagccgtgtatgatatgtacgaggatgacgacgatcatgaggaagacaaagaccagacgctcccggatcttcagcagggtcagcgcctcactgtctcatcattgaaagaaacgagcggacagacgaaaccgccggcgcgctttaatgaaggcacgctgttatccgcgatggagaacccaagcgcctttatgcagggagaagagaagaaccttgtaaaaacattgggtgaaaccggcggactcggaacagtggccacccgcgctgatatcattgaaaaactgttcaacagtttcttgatcgagaaaaaagaaaaagatattttcatcacgtcaaaagggaagcagctcttacagctcgtcccggaagatttaaaatcaccggccttaaccgctgagtgggagcaaaagctctccgccatcgcagcgggcaaactgaaatccgccgtcttcattaaagacatgaaaacatatgcgggcaaaacggtgaaggaaataaaaaacagcagccagactttcagacatgacaacatttcaggcaccgcctgccctgattgcggcaaaatgatgcttaaagtcaacggcaaacgcggcacgatgctcgtatgtcaggatcgtgagtgcggcagccggaaaacgctggcaagaaaaacaaacgcccgctgtccgaactgtcataagaaaatggagcttcgcggccagggcgaaggccaaaccttcgcatgtgtatgcggccaccgggagaaactgtccgtctttgaaaagcgcaaggcgaaagataaatccggacgcgcatccaagcgggacatcaactcttatatgaaaagccaaaacaaagaggagccgatgaacaacgcgctggcagaacagctgaaaaaactcggactggataaatagatcagagaaaggcagcatttgtaaagaaatgctgccttttgttgtgtttttaactgtaatgggaatacgatccagacgaagagggaaaaggtgagcagacggcgctcccatttaaaatttcccaatgtgaaaaaatgctagtattcttttatcgtttcctatatagtaaaaatactttgtgaaaaaataagatatgggtctaaaaaaggatttataaaataggaggatggactgtgaagcaattcgtttttcgtctgatgatccttttgatttcgatcgttctgacggcggggtgcgcggaggccggcactgaaaaacaggcggcggccgaaccgtccggaccgcttcagcccgcagagcattttatttatcataaattgatgaacgggcgggggatgatccggacgaacatatccggtgagccggaatatttatcagagtctctcggactatggatggcatttttgctgaacaggaaagatgaacggcagtttcaagcgcaatatcagcttctcaccgattcgtttctgacgaaaaacgagctcgtgtcgtggaagattgacgggaataaagcgagcggcaccaatgccttaattgacgatttcagaatcatgaactgtctgaatgaggccggaaccctatggggaaacagtgaatacgggaaaacagcggtacagatcgggaaagcgctggaaaaatacaatacgaatgacgggtattttacggattattatgatgccgcttcaaatgccgcgtcaaagaccgtgacgttgtcctatgtcgaccccggcgccttacagatgctcagagaaaaggggattatcgatgagaaaacggaaaaccggaacctcgatgttctcaatcttgcgcccctgaaaaatggttttctgccgaaatcgttcaataccgaaactaaggaatacaaatatgacagcgaagtcaatgtcatcgaccagctgtacgccgccgtgaatctgaagcggggagatggcaaagccgctgtgctgtcgaaatggatgataaaggaatttaagacgcgcggacagctgtacggacgatacagcgcagacacgaaggagccggcggttcaatacgaatcaccgtccgtttacgccctggccgttctttttttagcagaacaaaaagctgatccggctgtcatcaagccgctttatgaaagaatgacttcatttgaaacactggacacgctgaaacctgattacggcggctatatgagcgggggcgatacacattctttcgataacctgctgccgcttctggctgaaaggaaattgtttaatgaaaatatcattcaatgaatcacaaaaactgtgcagctacacagcagttatgctggtgctgctgtctttttttatttactatgcgtctcagcaatccgcagggcttctgataacctgcatcacattgcttgtcacgggagccggcatatggttcggggcaatctacgcgctcgtcatcaccttactcgtcttatttgttctcggcagcctgctcctgtggtttcagaccgggagctttatggcgtctgccgttgccgaaagtctgcaggtgctggtcatttgggggattgcgctgctgctcttttcttacatagcgggaaggattcacgagttggcgaaggggcttgagcgctcagtgaaacagctgcgtgaagagattacgagctttgttgccatcgacagggtgaccggctttgacaaccatctgcggatgaagctggagctttctgaggaaatcaagcgggcggaacgctacggcaattccttcgtctttttgctgctgcacatgcattatttcaaggaattcaaatccctctacggagaaaaagagaccgaccgcctgctggcatttatcagccgccaaatccggtcaagcgttcgggaaacagacaaaaaattcaggccgtccgccgaacggttcggcatcgtgctgacccatacgccagaagaacacatgccggccgttctggcgaagctgaaaaaggaattggatacgtaccggctgcaaaacggtaaatacgtctccatcaccttccgtgtatgttacttggcgtaccgaaaggatttacaaacggctgagcaatttttaaatgaactggaaaacgagatgatgatgaatgaactctaaatggatacgtctcttactctcggcgctcttcatgatttcggcggtttatgttccccttacggcggaagcaaaagacaaaaaggacggcattctcattatttatacaagcacggacggcaaagaaaccgctgaggtcaaaatgcttgatctgaccgcgggccatttctcatccgccgtcaccgtgaaaagcgacggagacatcacggccgcggacctcaaaaagaatcggcgcgtcatctattacggcgtcacgaaaaaaaagctcagcacatcattcgtgtctctgatcagcagcatgccgcagcagcttatcagcatcggctataacgccggacagttccgccaatttgcgggtttgtccctgacagagaaagaaacggtataccgcatttacggcaaagaagaaaaaacagacatgccgcttgaaaaagggatgtccgtgctcggcgtatcgggagtaaaaggaaagtccctttatacataccggtccggtgacggcagcacccgcccttttatgtggaaaacggcgcgctctgactattatttcggtgtgacgagcctgttaaatgattcgtttctgacggcgaaagcgctgcgcagcgctttcggagaatcagcgggcggcaccctcctttatttacggcttgaagacatcagtccgatgtcagatgaaacattgctttacgaagcgggcgcttacctgcataaaagacacattccgtttattctggcggtcattccggtctatctcaatccggaaaacggagaaaaagtatacttggcggacaagccgaaaatggtcagcgtcctgaaaaaacttcagcaaatgggcggcagcatcattattcacggctacacgcacgcataccgatacagcgaaacgggagaaggctttgaattttgggatgccaaagcggatcagccgatcacgtcagaaaatgcggatgatactccggtcaagcttgaaaaggaacaggattttccgaatgaaaaagcgtaccgggcgtatgtgaagcctttccgtgaaaaagaaaaaatctacacgagaacgaagctggagcaggcgattgacgatctgacagagctcggcctttacccgctgtcattcgaagcgccgcactatacgatgtctgaagaaggctataaaatcgcatcttcttatttctccagcattttcggacaagtacagctcagcggcacgacgtggaaaacctcgggcgcccctccgttcgtctcaaagccggctatgctggacgggatgacgctgtacccggaaacaatcggttatgccgataactcaaaggaaaatccgctcggagatatggagaatcatatttcgcagatgattgatttcggcggcggagtggcgggcggtttctaccatccgtatctcggcatgaagtacctccccgagctcgtcaatcagatggagcggattcccggcggcgagtggctcgatctgaagaaaacgaagcaaacggtaacgtcggacagcgtcaggatcaagacggacggagacggaaccattcatgtggaaaacaagattcatccgataacggcctttttcaatcaccatcagcagacgcctctggaaaaagcgctttggattctctccggcgtggtgttattgtttatcatcatgttcgcctgctacgttctttatttgcgcgccacattaaaaaaacgaatctttaaggagagaagaagccttgagtaacattctgttttttatctcattaagtttaatatgggtgatgcttctctatcacatgtttctgatgcagggcggattcaggcattatatgacctacgaacggaacattccgaaatggcgcgcaaagatgggggagctcccgaaggtcagcgtgctcattcccgcgcataatgaggaggtcgtcatcaggcagacgctgaaggcgatggtgaacctgtattatccgaaagacaggcttgagatcatcgtcgttaatgataattcctccgaccggacgggagacatcgtcaatgaattttcccgtcagtatgacttcattaaaatggtcatcacaaagcccccgaacgccggaaaaggaaaatcttcggcgctgaactcagggttcgcggaatcgaacggagacgtgatctgcgtgtatgatgcggacaacacgccggaaaaaatggcggtgtactacctggttctcggtctgatgaatgatgagaaagcgggagcggttgtcgggaaattccgtgtcatcaacgcggccaaaacgatcctgacgaagtttatcaatattgaaaccatctgctttcagtggatggcgcagggcggcagatggaaatggttcaaaatcgccaccatcccggggacgaacttcgcgatcaggcggagcattatcgaacagctcggcggctgggatgataaggcgctggcggaggataccgagctgaccatccgcgtctataatctcggctaccatatccgctttttcccggcggctgtgacatgggagcaggagcctgagacatggaaggtgtggtggcgccagcggacaagatgggcgcgcggcaatcaatacgtcgttctcaagtttttatcccaatttttcaagctgaaacggaagcggatcatcttcgatctgttttatttcttttttacgtattttttgtttttcttcggtgtgatcatgtcaaacacgatttttatcatcaatcttttttacgacctgcatctggctgtcgggtttttggcgatgattttgtggatactggcctttttcctgtttatgactgaggtcatgattactttaagcattgaaaaaacagaaatgaacaaacaaaacttctttatcgtatttctgatgtactttacatactcccaggcttggatcgtgctcgtcatctggtcattattcacagagatcaagcaccgcttgttcaagcaggaagtcaagtggtacaaaacggagcgatacaatcaaaataaaagcgggtgacctttttgaaaaaagcgatcatattgataactggccttttgctattgatgtataacgggcaggcggccgcggcccgggaactgaaaacggacggttccgccctcggaacaagcgccggcgcaaaagagcagcaggcgctgactggcgatctgatgacactgtacggggcgaaagacagcgcagagctgacctatcagattcctgcgggagcttcgaatgccgatcagtcgcttctgattgattacgaggcgtcaaacttattaattgccccgtcttctttaaccatcgccattgatgatgaacccatcaaatccataaagcttgacggcagttccaagcggaaaacggtgaagctcaacctcagcaaaagccaatccgcccaaggctttcacaatgtatcattacgattttacggcgtattaaaagagggcgtctgcgtcaggcaggatacgtcaggcaactggataaaaatttacccggacagccgccttgtgctttcagaagcaagcaagtcaaagggagcggatctcggccatttcccgtatccgtttgctcaatcaggcaatacgggtgaagaaacatatattatccttcctgacaaaccgacctcggcggaagctgaagccgcagtcaaaacagaagcatttctgaaaacggcagacagcaggctgaaggtatcctatgtaaaagaatccgacgccggcaaaatcagcaatccgtcaattgtcatcggcgctgatcagcattggaacgggaaaataaaagagcttttcgaacgcgggaacatcaaagcggaggacaacaaacttcttctcgctgaacgggttctgacatcaggggacaaacggcagcccgtcctgtttgtcacggcgcaatcagacaaaacgctggcggataaaatccgcgtcattacagacagcgcttattcaagccagctgggcggagatactttgacaatcggccgccttcagcctgctgcggaaaagacaggcaataaactgacactagaggacttcggcgcgggaaatgtaacggtcggatcaaacaaaacggcgtcagagcacttcttttaccctgcggcggccgctgttgataaagacggtaaggtcaagctttcacttacattaaaaacgtcggaatcgatccggacgaaggcggattcagcaaatgacgccgagagagcggagctgaacgtcatggtcaacggacagccgaatgcggtgcgtcttgatgatctcggtaataaagataaagacggcttttaccacgtctccatcccgattgatccgaagcttttgcgaagcagcaggtacattgatctgcaatttgtcacatcaggtttgaaacataacaatccgtgtatcgaccgtgacgaaaacaaatgggtctatattgataaaagcagcacgctgacgtatccggtaagcgatgcggcgcagaaagctgatttcgggcaatggccgctcccgtttgcgggcggcgggaaagagaaaacagtgatcgtcatcccggatggcgtaaacatacagacactgaaagaactttctctggtggcggattcattcggaaacggctttaccgtaaagacggcatcagacatgaaggaagcggatgccaaaggccggaatgttgtgtttatcggaggcctgccgcaaattccgcttttgaaatcaaacgcctctaagcttctcgtgccgtcagaccgcagcggagcttacgatgtttcttcgtttcagatgctgaatgagacgacgaaacaagtcgcgtttacccaggaatcaccttgggacgccggccggagcatcgctgtttttgctccgttatcaggaagcggcgcgtctgtcacaaaagagctgatcagctttttagacagcacaagcgatgccgcaaccgtcattaacgaaacagccggccggcagctgttttcgaatcatcagcaaatcaagtccgatgacagcagtccggcggctgatacgaagagccggtccgcagcactgaacgttacgtatattgctgttttcgcggcgcttatgatcattgcggccggtctgatctggctgacggcaagaaggaaaaaaagaaaaacggatcatgaaaaaagcgaagagtaatgaaggaaaaagaggccgttaacaagcctctttttttgtatttttatttccatttttggcggtgatttttttatttttgaaacagcataaaagcccctttacaactgaacgggacgggagtatgatctcttttataatctatatcgcttaatctgtaatcagagcgggggaaccaatttgcggcgcgtgatgccgcttggggtgaatcctttttcaggtagggccaactctcatcagcccgaatccgacagctaacctcgtaagcgttcatgagaggagatgaatgaaacctgtgcacgattatggcgcaggggcatccgtttgcctctgtgtctttttgctgtgctgaaatatggcatgcaatcagcattcggagacatcatagcagtaaggttttgtaaatcaaacggaaaatgaaaaaaaggggaagacaacaaatgtaccattcaatcaaaagatttttgattgggaaaccgctgaaatcacaggcggccggagagcagaaactcacgaaactcaaggcgctcgccatgctttcttcagacgcgctgtcatcagttgcttacggaacggaacagatcctgatcattttggctgcggtaagcgcggccgcgttttggtattccattccgatcgcagcgggtgttctcattttgctgcttgctttgattctgtcctacagacagattatttacgcttatccgcaaggcggaggcgcttatatggtttctaaagaaaatcttggtgagaagcccggcctgattgcgggcggctcattgcttgttgattatattctgacggtggcggtaagcatttctgccggaactgacgcgattacatcggcatttccggctttgcacccgcatcatttgctcattgctgttttgcttgtgattctgattatgattttaaatttgagaggactgtcagagtcggcgtccattttggcgtatcccgtctatctgtttgtggcggcgcttgtccttttgatcgtcgtcgggctgtttaagctcatgacgggccaggttcatccggccgagcatacaccaatcggcacgcccgtggcgggcatcacgctgtttttgctgctgaaggccttttcatccggctgttcggcgctgaccggtgttgaagccatttcaaacgcgatcccggcctttaaaaatcctccggcaaaaaacgcggcccgcactttggccatgatggggattctgctggcgatcttatttacggggattacggtgctggcgtacggctacggcacgggtccgaagcctaacgagaccgttatttcacaaatcgccgcggaaaccttcggccgccatacggtgtattatttcattcaaggcgttacatcattgattctcgtgcttgcggcgaatacgggcttttccgcatttccgcagctggcgtttaatttagcgcgcgatcagtatatgccgagaatgtttacggtccgaggcgaccggttaggattttcaaacggaatcatctttctcggtatcgcgtccatcctgctcattcttttattcggcggccgcacggaacatttaattccgctttatgccgtcggcgtgttcattccgtttacgctgtcgcagacgggaatgtgcatcaagtggatcaggcagaagccgaagggctgggcggtaaaaatgctgattaactcatgcggcgccgccatttcatttatggtgctgtgtattttattcgcgacgaagttcaatcttgtctggccggtgctgttattcatgcctgctgtcgtcatgctgttcttcgtcattaaaaatcactacaccgcggtcagcgaacagctgcgggtcgttgatcagcagcctgaggaaatcaggggaaccgtcgtcatcgtgcctgtcgccggtgtcaccaccgtcgtccaaaaatcgattcagtatgcgaaatcattatcagatcaggtcattgcggttcatgtttcctttgacagagaaaacgaaaaaaaggtggaaaagcgctgggaagaacttcataacggcgtccgcctcgtcaccctgcattcctcataccgcagtctggttcatccgtttgataagtttttagaaacggtcgaacagaaagcgaaaaaagaacagttctccgtgatggtgctgtttccgcaatttattacgaagaaacgctggcagaccatccttcacaaccaatcagccttcttgctccgcgtccggctgttttggaagaaggacataatcgtcgccaccctgccgtatcattttaaaaagtaacggaaagaccgcaggctaaaatgccgcggtcttttttgtaaaggaggacgacatggcacaaggcgcttttgtcatcatacaaaatgacgggcgggacatattgctcgtaaaacgaaaagacgttccactatgggatttgcccgggggcaggattgaagaaggtgaaacacctgaagccgcagccgtcagagaggccttcgaagaaaccgggtataacgtgaccatcctgcaaaaatccggtgagtatgaaaggccggcatttgaagatacacagcacgttttcatcggagccattaccggaggaacaccgctgatgaacggatcggaaaccgccgctttacgctggttttccccaaaccggctgccgctgttcatggtgccgaacagaaaacggcaaataaaagacggactcaatggggcggcaaatcgtaaggcagtccttaaagaccggaatctgttatccatccttgatctgctaagaaaaaagctgagagtatagcccgtgtttcaacccgtttgaaaaagggcatgaatacaggtaaaaggaggatgcagtatgccaagtaaaacagcaggacacgtaatgacggagctgcttgaacaatggggagtcggtcatatatacggcattcccggagacagcattaatgaatttatcgaagaactgagacatgaacggaataacctgacattcatccaaacccggcacgaagaagtcgcagccctggctgccgcggctgaggcaaaactgaccgggcagatcggtgtctgcctttcaatcgcaggaccgggggccgttcatctgctgaacggtttatatgacgccaaagcggacggcgttccggtgctggcgattgcgggacaggtggcttccgatgaaatcggccgtgacagctttcaggaaatcaaattagagcaaatgtttgaggacgtggcggtattcaaccagcaagtacatacggcagaagcgctgcccgatcttctgaatcaggcgatccgcacggcttacagcaaaaaaggcgttgccgttttaaccgtttctgatgatttattcgcgcaaaaaatcaaacgggagccggtttacacatcgccgatatacctcaaagctgatatagagccgaaaaaagaacatctcgtgacatgcgcgcaatatattaacaacgcaaaaaaaccggtcattctcgccggccaagggttaaaatcagcaaaggaggagctgctcgcattcgccgataaagcggccgctccgattgtcattacccttccggcaaaaggcgtcgtgcctgacagccatccccactttctcgggaatctcgggcaaatcggcacaaagcccgcctacgaagcaatggaggaatgcgatctgctgatcatgctcggcacatcgttcccatacagggattatctcccggatgatacgcccgccattcagcttgattcggatccggcgaaaatcggcaagcgctatcccgtcaatgcgggaatcgtcagtgatgcggctctggggctgaaagagctgacggaatacattgaatataaagaagacagaagatttttggacgcctgcaccgagcacatgaagcattggtggaaggaaatcgaaaaggatgaaaccgaagcgactcatccgctcaagccgcagcaggtcattgcccggcttcaggatgcggccgcagaggacgccgtcctgtcagtggatgtcggaacggttacggtgtggatggcccgccattttaaaatgaaaaagcaggactttatcgtctcaagctggctcgccacgatgggatgcgggcttcccggagcgattgctgcaagccttgccgaacctgagcggcagtccatcgccatttgcggagacggcggattttcaatggtgatgcaggacctgccgacggctgttaaatataaactgccgattacggttgtcgttttaaacaacgaaaatttaggcatgattgaatatgaacagcgggtcaaaggcaacattgactacgtcacccagctgcaaaatatggattacgccgcttttgcagaaagctgcggagcaaaagggatcaaagtgacgaaacacgaggaattggctcccgcttttcatgaagcgctcaactcaaatgagccggtcgtcatcgacgccgttatcggcgacgagccgccgcttccgggaaaaatcacttacggccaagcgaagggcttcagcaaatacatgttgaaaaacttctttgaaaaccaaaaaatcgaaatgccgtcactcaagaaaagcttaaaacggctgttttaaaaagccggcggttataaaaaaataaacaggcagcatgcctgtttatttttttatttgttgagcgacttggcttgcatatagccgtcctaaacggaaacggagattgtgaaaagccgcggctggcgagcgatggctgatcaaaaaacttatgaaggaccagtgcaattcatctcaagaacagccagagagcggtcacaacagcgatcataaagtaatctccctcattcagtgtagttccatttttgacaaacacacgtgccgtccggtttgtctttgtccctttcggggttttaagcgcaatgttcttccctatattgtaataaacaattttaaacaaataatatgccagcgaacagaataaaaagagcaacatgaacttgccaataaacaatatcatgtttcattactcccttttgcagttttttcgtttgaatatatgacggaaaagtcaggatgttatataaaaggagaagtattttacagaggctggtgttaaagattaatgaacggttcgccgcaacatccccagatccggaatcatttcaaaacgaaagagaagcccgaggattattaaaaaacagtcgctaatttgtccgcttttttttgaacatttgatctaagatgaacataaagagggtgaataagaaggacaccgtaatcatatctatcagaaatacattaggagtatcttttattaatagcagccataccacctgcaaaactaaagaaatagaaaaataggatatatatgtcatgattctcatatttgttacccccttagcctaatttctcttttgtgatcttatccaaattagtgaaaaggatatccaatcccgaaaataagagagtgatgaacaatgaaagaagaatttctccaccttgaaatatagatatgttctcaatgatatgattggaaacgtattggattgagaagtaaacagcagcccatgcaaaaatgaattcaaggatataggctgaccaagcaggcaatgtcaaaacatgagtcattccttttacaattgccgtaaggattagcatataaactaaagctaagatacttacgacgacagaaaatatgtataagtctgaaagtgaaccatagatgatatattctccgaaaaaatgatttacagttatagctgcaaaatacataactaggctaggtacagttatagcgaagaacagggagaatccaataagtacgatgaatgctgcatgagctaagcggtttggcggtgtatccacgatctctttttttaatagaatcataaaaataagagatgaaatcacaaggcagcataagaaagtgagcaaaacagtaaaaaagacagtcattttgacatctccaatgaaaaagtgctattagagtgaatctaacagcactttgcattacttcatacgtattttcctgacgatcatttatgaatgattttaaaatgctttcattgctaaagttgtcaattgagcgaggtttttagcctggctgtcagaaagtccggactttttaagtgagagataaagattcttttccacgtcagtccagcttaaggcgacatactcgttcagcattttctttaaaaccggttcgatgtgttcagtgaaaacggactcgagttcatttcttattttctttcctgctaatttttcaacaagattgaataattttgttttatttttcagcacttctctgattacatctttgactggttttgacacagatgcatcgctttgtgctttaagtccgtaggaaaattgcgtatcagtctgataaaaaaatgatttggtcgttccagtggcattggcagtattattatgattttctttagctaaggatgcggggacaaaagcagtagttacaagggctaaagatgcggcaaacagaatgcctttagctgcgtgtctaatgggaaatcctcctttagaaatgtagtgtagagagaaatgaaagactatgtatttaggcgggaccgatatgatccgctttgaacattttcccctctcagataccattctatcaataggtatttttggggtaaataggattttaatacagtatttttcttataattcaaaatcttctttagcaggattcattttggctgcagtttcgatgagatgggacatgggctggagcctatataacacatgtacaggctgattgaggcggaatcacattatcggagcggttttataatttagggttaatgaataaaaataaacaggcggcatgcctgtttattttcgtttgcgtgaaagagcgaagaaaaacgggaaggcggagccggccaataacgtaccgaataaaaacatgcccccgatgaacacatgatagttcaccccgccgatccaaagccccgtgattaaggaaacgatgcttaatgcgatcatcaaaaagccgggaatcagacgtttcttacccgttgtccgataagcaaaaagagaacagaagatgccgatgacaatcggcacaatccacagataaaaaaggataaatactgacataagcaaaactccgatttttcttctatcataccaaaaacgcccggaaaaagatacgaacggcacccggcgtcaaaagaaaaaccggccgcaatggccggtttttttctaacggaatgaatcgtagatcacaaacagattaagcgcgatcaccaaaaccgcaatcagccaggcgagagccgtcacccattttcggttcgtcagggcgcccatcaggcgtttgttgcttgtaaacataatcagcggcacgagcgcaaaggagatgccgaatgaaagaacgacctggctccatacgagcgcttctgtggcgttgacccccgagataatgatgatcatcggcggaatgatggtaatgaaacgccgcaaataaagcgggatacggtaacggatgaagccctgcatgataatatcgcctgacaatgtgccgacagaagagcttgaaagtcctgcggccagcagcccgatcccgaagagaatggctgaagccggtccgatatagtggccgaattgctgataagccacgtctaaatcttctacatacagcccgttcttgaagaaaagcgcggcagcgacgatgagcatgcttgcgttaatcgccccggcgatcaccatcgcgatgagaatgtcaatcgtctcgaatctaaaaatctttttccgctcactatccgtttttccgacgacacggcgctgtgtcagtgcggaatgtaagtaaatggcatgcggcatcacggttgcgccgagtatcccggttgccagaagcacactgtccattccgtcaattttcgggataaacagcccttcgagaacggaggcggcgtcaggtttggcaaagaaggtttgcagagcgaaggcgatcaccacgacgaacagaagtccggcgatgcccgcttccagcgcccggtaaccccggcgctgcagctctaaaatcgcgaatgatccgatcgccgcgataatggccgcttcaaccatcggtatgccgaacagcaggttgagtccgagcgccgccccgataaattctgccagatcagttgccataatcaccagttcaccctgtatccacagcccggctgatacccatttcggataccggtctctggcgatttccggaaggtttttacccgtggcaatgccgagcttcgcggaaagaacttgaattaaaaaagccatcaagtttgaaaagaggatgacccacagcagcatatacccatacttcgaaccagctgagatattcgtagcgaagtttcccggatcaatgtaggcaatcgccgcgataaaggcggggcctaaaaaaggcagaagccgcttgaatcccttgcttttgccgtcaagtgcatcctgcacggcttttgcttgcagtgattgtgctgagatgtctttgctcattatgtctcacctaaattccgatagatttttagctaaataacaaaaagtttcctagatgcaaattattttatctacatcataaatccgctattataagatgtcaagttctttatgttcaataaaccggcacattgatgccctgttttatctatgatatgtatcccgccgaagaaaggtccgaaaatgaaaacgacatcgttccgggaaagaagcgatgccgttcgcaaagcgtgtttccgcgtccgatcatgcgcggatgcgtggagcgttcttttaaaaaggtgaaaagaggacacttgcctaataacttcacaactttctgtccgcccaactgatttgagaaaaagacgctgtatttcctccgttttcccgggtaaatagaataataatgtttctttccattggaaggtaaaacctttctgtaccattcaaatgacctccggaaaaactccggccgctctgaataaacgtttgaatcaacgatatatcagtgattccagtccaataaaccgctgttatctatcaaaaaaagaatcggcatggtcacttgcgaagaaaagaagttggagcattagacttatttcagtctcccgggcgaaaaagtataataacgtcaggaaagctttccggccatatgataaaagagggggaattttcttggtacgtcgtttgtcgatcatgtctttagccatgatttttgctgtttctttattcgcttttggcggctctgcatcagcagcagctttcaaacctaaagctgaaccggacgtttccattttagccagcgggggcacagtcggtatttacggtgctaatatgcgctcatgctctaaggtcagctgttcaacgatcacaacattctcaagcggtaaaaaaattacaggttcttgggtaaccggagaatatgttcaaggccactacaccaattctaataaatggctgaaagtcacgtatgcaggagcgacaggctacgtttcagtcaccacgctatcttattattacggtttataatcagaaaaacctcgttctcttgagagcggggtttttcctttattccgattcaatttccgcgtttcgtttcatcatcgtgtttcatcagctgatcgatttcttccttagaagcgttttttttccactctttcgcctgacttgtcgcaatgggaatggcccgtccttcttcataaccctcatctaccatcgcattcgcgatttcgatcgcttttttcttcacaggttcctcgagattcttcaatgattgcggataatccttcatagaccaaggcatgtctatcactcctttatgaaaagtgtttcccgcctgaagaaaaagaaaaccgcctcatcaaaaagaatgacagctatttttacgagagaccagcaatttccgaataaaatataaaggataaagaagcaagtacagattgaatgcccaccacataagatcaaaatcaccgataaatacccaaaaggcaatcgcttgcaggcctgaacaaaaggtcagtacaagtgatattaatgcgaaagggcgccataacgcatgtttccgtttataaagaaacaagctgtacagcccggttatcgaaatgaaaatatctaagggaaagaatgaccagttccaggccatgatcatggcgttatcataatctttaaacaccatattttttggaatccactcaaaaaaagtaacaatccaataaacgataaatccaatatctgtaatgaggaagagaacctttaaccctttcattatctgtttctgtccgtatgaacgctgatgccgtttgatgacgtttcactttcagaaataaagtttaaggaaacgacaccgatgatgatcagaagaacagagacagcttttatgacagagaactgttcatgaaagaaaaaaattccgatcaccgaaatcagcacgatccccattccagaccagaccgcatacgcgatggagacacttatatatttcaaagtcaaagtaagaaaacaaaggctgccgatataaaacaataataataaaatacttgggacaagttttgtaaatccatttgataatttcatgctgaccgtacccaatacttcaaaaatgatcgctaaacttaaataaatccattgcattcaacattctccttcaatcgtattactcaaaattatacaataatacagaatttgaagaaaattaaacaatgggatgttttccggataaaaaatccgtccgggtgtaaaaagaaaacgccataaaggtatactatgaacaaagaaatcagaaaggacgtgcaggacgggtgacagaagagcggacagacctggaaagacaactgagagacattcaaaaatgggaaaaggcgcagcagagggtgatgttctggcaaacattcacccgcttgccgtttcagcttttggacaagctgacaccgcaatttattcagaggaaaatcggactcattctcgatgaaacgggaacgtttattcagtcaggcggacagtacctgacatcagaaaagcgcatcatgaaaaagtttcaaaaacggctgccgcacggtacatgtcaaacgcttcacgacatccgcaatgcgccgcttgccgtcatggacgaaatcgcagaagccatagcgcgtacaagcgtaaaggccgcgacggtgcagggagccgcaacgggagtcggcggcgtattcacgctggcggcagacattccggcgatgctcggcctgtccttaaagacgctgcaggatatcgcggttgcttacggctttgatccgaaagacaaaaaagaacgcgtgtttatcgtcaaattgctccagcttgcatccagtgacgtcatcggaaaaaaagcgatcctgcaagatttacggcaatatgatcaaaacgaccgcgcctatcagcgcgtcgcctcgcaaatccaaggctggcgggaagtcgtttacagctaccgcgatacgttcgccgcgaaaaaactgctgcaaatggttccggccgcaggcatcatcttcggcgcgtccgccaaccgttcagctttagaaagcatcgcggaaacaggcatcatgctttataaaaaacgccggattctaaaacgcctggacgatacagaatgataaaaaccacccgaaaacacattcaatgtgttttctttgtttagcagttctgaaatcgggaaaccaacaaccaacaccaattaaaggaggaattcaaaaatggcacaagataataacaaaatgagcagagaagaagcaggtcaaaaaggcggagaagcgacaagcaataaccatgacaaagaattctatcaggaaattggtcaaaaaggcggagaagccactagcaaaaatcacgacaaagaattctatcaggaaatcggtgaaaaaggcggagaagccactagcaaaaatcacgacaaagaattctatcaggaaatcggtgaaaaaggcggagaagccactagcaataaccatgacaaggaattctatcaagaaatcggccaaaaaggcggagaagccacaagcaaaaatcatgacaaagatttttataaggaaatcggccaaaaaggcggaaacagacgaagcagctaataaaagcataaaaggcagacaacctgcagatcaaaagcgatccggcgcatcagctggatcgctttttattttgggaaaatcttgatctgagccgccgttgcgatacaataaatgaaaaaggggtttttcactcgtgtctgacatgctgaatttgctcgctatcgccaataaagtcaaagaaaaacacgacaatttttcaatcgcggagatcaatgaccactgtgtgcgcctcgcagtgtttacgggagaatatgactggcaccatcaccctgactcagatgaatggttcatcgttctggaaggggagctgctgattgattttaaggacaaagaaaccgcagtgctcaaggcaaatgacagcctgctcatcccgaaaggcacgattcaccgcacccgctcttacgtcagaaccgtcaatctttgtgtcgagcatacgcatgcgaaaacagtcatcacagaggaacgtcatgctgatcaaaaaaattgtatgtgaaacagacgctgcaaacgctgaagcatttgcgcaagcacagtcaaggtggggagcattatcatgtgtaaatggattcgtcaaacaggccggcggctggcggaaaaacgcagacggcctgttcatcgcagagatcatcagcgtttgggagaacagacaggcctatgatgattttatggagaacgaacatgaccgcctatacgaagaaatcgagcagaaggctgcgattctttcaatagaagtgatgctgtacgaggaggatgaacctgtcattcacgagctgttacatcacccggacatccgatacgaaccggactggacggttctgaaggcataatgaaagcccaaaacagtttgttttgggcttgtgtctttactcgcgtccgggaagcgtgttgtggacatacggcgggacgggatccagcttagctatttcgccgtgcgctttcggttccttttcgtattcaaatggttctccgtccggcgctgtttccttcagccaattttgttcagcgctttctccgccatcagagaaatgaataagcttatgggagaatgactgtttttccagcgccttcgggaatgtggaaggaacgatcgggccttcctgtgcttctaattctttaatggccgcaagccattggttttgatgcatggtatcgcgggccaataaaaagctgagcatatctttcacgcctttatcatcggtcatttcatacaggcgtgcgacttgaagccttccttgtgattcggcgttcagattggcgcggaagtctgccagaaggtttccgcttgcgacgatatagcctgcgctccacggaacgcccgtgctgctctccggcattgcgccgagtcctgagacgatcgcatgatgcggattcatcccacctaaaatggacccgatgaccggatcatcagccgctttttcctgctctgccagcggggcgtcttctaacaatctcgcaatcatcgtcgcgatcatttcgacatggccgatttcttccgtcgcggtatccatcagaagatccttatatttttcattgccccgtgtattccatccttggaacaaatattgcatggcgacggatatttccccgtattgtccccctaaaatttcctgcatctgtttggcgaacagcgggtcaggacgatccggtttagccggatgctgcagttttttcgtatgtgtaaacatgtctccatctcctttttttgctctgtccctatttacttccccggcgggaaaagggatgaaacggagatgggcgtattggtcctgctaaggctcgcggcgcaaggataacaaatcctgcacaagcccgcggccgatcacctgttcatattgtccgtaaatcgggtcgaggcgtttcatccatgtgttcttttccgctttgctcagcacatgaatatgaatggatgaattcttctttatctcttcaagctggtctttattcattttctcagcggaggcttcgttccattctgtcgtttctctcatcgcctccgttaagatggctctcgttttttctgtctgcgaattccagaaatgctcgtcggtcatcacggcataaccgaggtacccgtgattgctgattgtcaaataatcttgaacattataaaattttttagaatagatatttgaaatcgtattttcttctccgtctacgagattgctttccaagagctgaaacgtggaattaaaggaatcctgccgcgggcgggcgccgagcaggcggtactggtcttcgatcacgctgctcggcatgatcctgagcgcctgtcctttcaaatcgtccggagtgaagatcggccctttatttgacgtaagctgcttaaacccgttcgtccagtacgccagtcctttcaaatgatgcttttctaatgaagcgaacaggcgtgtgccgattttgccgttgaggccttcttgcacggctttatagtttgtaaacgcgtacggcagatccaaaacaccccattcgggagacagtgatccgagctttgaggtggagggagcgatgaattgcacgtccccgttttggagggcgtttatttcttcattatctgaatagaggctcccgtttggaaacacctctactttaatggtgccgccggacttttgatagaccaggtcggcaaacttattcgccgcccgcccttttggcgtgttctcagcaacgacatggctgaatttgaaaacgatttgatctttcaggccttcctgttcgtcatcataatacggttcttccgttgagaaacgatcatgaaagccgatgaataaagcggttccgataccgagtaccatcaggctgagacaagtcagcaagcttttcatcgaaaaccccctccgccattttctataacaagcataatcgggcgggccgttttcgtaaagagacggaaaggaagaggccaatgacgaaaaaaaagctcaccatccgctggaaaatcaccatactttcgtatatcgtcgtgctttttacctttttgatcgtcggcatcgtgctgatcggcaatattcagcatacagaggagcgcgagctgaaaaaacggctgatgaataccgcgcggacggtatctgagatgaccgatgtcaaacgcgccctcgagcagaaaaaacaaagggaagacgtgcgccatgcggtcgaagaaataaggatcatcaatgaagcggactacatcgtcgtcatggatatggatcatatccgctattcacatcccgtcagcacaatgatcggaaagcgttcaaggggtgaggacgaagccgcggcgttcgccgagcacatttatttttccgaagcaaagggagaaatcggcaccgccgtccgcgctttttatcccatcaaagaccgggatttgaatcagatcggcgtcgttctggccggtaaaacgctgcccggattcggtgaaattcttcttcagctgaaacatgaaatactgtttatcgttctgctggcgctcgggttcggactggccggctcctttttgctggcccgccatatcaaaaaacaaatgttttggctggagccccatgagatcgtgagaatgtatgaggaacggaccgctacgtttcattcaatgaatgagggcgtcatcgcgatcgataatcagcatcacatcaccatttttaatgaaaaagcgaagcagatattcaatgtcagacaagagaccgatggcaggctgatctgggacgtgttaaaagattcgcgcctccctgagatcgtcgagcggaaccgagccgtatataatgaagaaatccaagtcagcggaaaggtgatcatgagcagcagaattccgatcgtcatgaaaaagaaggtcatcggagccgtcgccatttttcaggacaggacggaagcggcgaaaatggcggaagaactgacaggtgtgaaaaattttgtcgatgcgctcagagttcaaaatcatgaacatatgaacaagcttcacaccatcgcgggactgattcagctcggaaaatcagaaaaagcgctccagcttgcttttaaggaatcatcagaacaagaaagcgtcaccgattttcttcatcaggccattcagaatgacgctgcggcgggactgctgttaagcaaaatcaaaagaggaaaagagcttggcatttctgtgaaaattgatgaaaacagcagtttctcggcatttccggagcatgtcgaccagcatgacattgtcgtcctgctcggcaatttaatcgagaatgcgttcggcgcattcgaaacagcggacacggaggacaaacatattgacatcagtatcgagcaaaatgatgaagtgcttgctatattaatagaagacaacggaagcgggatttccgatcagcacatcccgcgcctttatgacaaagggtttaccgtcaataaaacgggaggaacgggatatggcttgtacctcgtcaaacaaatcgtcgacaaagggatgggcgttattgaagtcgacacacggcagggacagggaacggcattttctattttatttccgatgaagggggaggaatcattcgatggacatcaaggtgctgcttattgaagatgatccgatggtgcaggaggtgaataaagaatttatcaccggtgtttcggggttcagcgtcatcgccacagccgctgacggagacgagggaatcaggcttattaaagatctgcggcccgggctcgtggtattagacgtatacatgccgaaaaaagacggaattaaaacgctccaggaaatcagaaaacaaaagctcgaagtggacgtcatcatcgtctcggccgcaaaagacaaagaaacaatccagcttatgctgcaaaacggtgcggccgactatattttgaagccgtttaagctggagcggatgagacaggcgctcgaaaactataaacaatataaacggaaaattgaagagcatgacaccatgtcgcaagagcagcttgacatgctgcttaaaattccgcaaaatccgtcccgcgatctgccgaaggggttaaatcattttacgatgaatgaaattttgacctatatgaaacagcagacggagccgctttcagctgaagaagccgccaaagcgctcggaatcgccagggtgacagcgcggcgttatcttgattttcttgaaaaagacggccagattaagctcgacattcaatacgggggagtgggccggccggttaaccgctacaaattcgtccgctagccgagaccaaaaagaccaaaatgtccgttatgatcataagcttcccctctttgtttgaaaacgctatcattttgtatagacgcagcgagaggcaagggggagtagggatgaaaattttcaaaaatcttacggtgcaggtcatcacggcggttatcatcggcgtcattgtcggactcgtatggcctgaggccgggaagcagatgaagccgctcggcgatacatttatcaatgcggtaaaaatgattatcgcaccgatcatattcctgacgatcgtgcttggcatcgccaagatgggagacatgaaaaaagtcggcaaagtcgggggaaaagcatttatttattttgaagtcgtgaccaccatcgcccttattatcggacttctggtcgtcaatatcatgaaacccggtgaggggcttgattacagcaagcttgaaaaaggggatgtctctcagtacacgcaaaacgggggacaggggattgactggattgaatttatcactcacatcgttccgtcaaatatggttgacgctttcgcaaaaggcgacattcttcaggtcttattcttttctgttttattcggtgtcggcctggcggcgctcggtgaaagaggcaaaagcattattgatttctttgataaactgtcgcatgtttttttcaaaatcatcggctacatcatgcgatcggcgccgatcggcgcattcggagccatggcctatacgatcgggcacttcggccttgattccatcaagccgctggcgagtctgatgctgtctgtatacgttacgatgttcctgtttgtatttgtcgctttgaatatcatttgcaaactattcggtttcagcttgtggaactatctccgttttattaaagatgaactgctcatcgttctcggcacaagctcttctgagtccgtccttccgcggatgatggataaaatggagcgctacggctgttccaaatcggttgtcggccttgtcattccgacgggatattcttttaacctggacggcacctcgatttatctgtccatggcgacggtttttctggcgcaggtgttcggcgttgaccttaccatcggccagcaggttacgatcattctcgtgctgatgctgacatcaaaaggcgcggcgggcgtaaccggaagcggatttatcgtgctcgcctccactttatcggcgcttcaggttattccgctggagggactggcgctgctcctcggcgtcgaccgctttatgagtgaaggaagggcgatcgtcaacctgatcggaaacggaatcgccaccatcatcgtagccaagagcgaaaatgagtttgacgaagcgaaaagcacacaggccgtaaaagaaatgaaaacggcggtataaaaggaaaggaacggcatgcatcgggcatgccgttctttttttcggccgccatgagtaaaaaagataaatttgtttaaatttattaggaggtggacaaagaccttagcgtcattttgttatataatttacaattagagagtgaaagatgaaatctaagggctttttgtcctagcaggagtgtataaatggcggctatttttaaattttttcagcatccgggtgtcagacgtttttccgtttttcttgttttgactggggtgttagttgtattccgaagtatgattaatttgattttgcttacgtttatttttacttttctgatggatcggctggagactgtcatccggcacgtgttgaaccattttttccggatcagccagagggtggtcatcaccgttttatatattgcgctggctgtcggggcgactgtcggaggctttgtcttttacccgattgttgccaagcagattgaacagctgattaagcagatcaagcacatcgcgtatcatcccgatgtcattccgttttatgatgagatatcgagcgtgttcggcgatatcaatatcggttcctatgtaaaagaaggttttaatgtactgtatacatacttggccgatatcagcactttcggtttgcaggtcgtgatgtcactgattctcagcatgtttttcctgttcgagaaaaagcggctcacggagtttatgaaaaaatttcagcacagcaagctgtctgttttttactacgaacttgcttatttcggcagcaagtttgcgagaacattcggcaaagtgcttgaagcccaatttattatcgcgctggtgaactgtatcctcaccttgatcgcattggcgattctgcattttccgcagctgttcggcctgtcaatcatggtctttttcctcgggctcattcccgttgcgggtgtggtgatttcgctcattccgctcagcatcatcgcatatacgacgggcggcgcagcgtatgtcatctacatcgtgctggtcattttcgtcatccatgcgattgagacgtacttccttaatccgaaactgatgtcagcgaaaacggaactgccgatcttttttacctttacagttctgattttctcggaacatttcttcggcatttggggcttgattatcggaattccgatttttgtgttcctgcttgatattctggatgtcgtcaataatgaagagaaggaaaaaaacggaccggtcccggataagacataacgtcggctccggctcttcacgaatatatgactaatgttataatgcagacagtgcctttgtacgggcactgtttattttttgtgaaaaaggaggaaggctgtatgactgagccgattttacatattgaaggccttgacaaaacaataggcaaaaagcacattttaaaaaacatcagcatggatgtcaggcagggcgagatcatcggtttgctcggtccgaacgggtcgggaaaaaccacacttatccgaatcatcgtcggtcttttaaagaaaaacagcggcacgattacaattaacggctttcagcacgatgctgatttcgaaaaagcgcttgaatccgtcggagcgatcgtggaaaatcctgaattctacccgtacctgacggggtgggaaaatctgaagcactttgccaacatgcacaaaaacatcaaagaggacaggcttcaggaagtcatcgaacgggtcgggctcaccaatgccgttcatgacaaagttaaaacgtattcccttggtatgcgtcagcgtctcgggattgcgcaggccattcttcaccgtccgaatctgctcattttagatgaaccgacaaacgggcttgatcccggcggaatgaaggatttccgcgatcacttaaaggaactcgcggagcttgaagggacgagcatcctttttgcgacgcatttattgcgtgaagtggaggacctttgcgaccgtgtcatcatcattcaaaaaggtgagatcaaaacagaggttgttctgcgcggcgctgaggaaaaagaagaaaaagccgtcctcgacattcagccggctgacgaagcattcgaatggctgtcccaacagcaatttgctccggagaaaaacggcgggggcattaccgtcaccgtagcgaagaaggacatcccggcattaaaccgtgcgctcgtcggacaagactttctcgtgtattccatcatgccgtatgcggaatcgctggaggatgaattcatgaaagtgacgacggcgcttcaagaggagggggagacgaatgtttaaattgacagcgaatgagcatatgaaactctttaaccgaaaagtctcattagtggcgctgattctgatggccgttctccaatttattatggcgcttgtcattaaacggcttgtcatcagttccggaacggatgagaatttcatcggctatatggcgtacgcgcccgggctgaatattctgcttgaggcattaacgatcgtgatcgcggcaacgatcatttccgctgaatttgataagaaaacgatcaaatttttgttaatccgcccggtaaagcgggagcggatttttgtatctaaactcattaccgtatttttggtcagcttgtacctgtatgcggcgtactatattttgtctctgctgttcggcatggctttcttcggcgtgtcggtgacatctgaatcagggacgcttcttatgaacaccctgaaagtaatcggcacgaactgggtcgaggcgtttgcgatggcatgctttggcttgctgtgttcttctgtattccgaaacagcgcaacggccgtcattttgtcatttatcgtgctgtatggcgcaaaatcactcgtgacgattatgtcgctcttccaaaacaaatggggaagttttctgctgtttgcaaatactgacctgacgcaatatatgagcggggcgaaaccgctgtttgcgggaatgacgccgttattttccgcaggcattatcattatccatatcgtattcttcttagccgtcgcttggtggagcttttgcaaacgcgatgttcgggtataaagtaaaggaatgacatttttgtgaaaaagatcacgataaatcaataatttatgctattttgatttataataaaggtaatgacggaggtgctcacttgagaaattttattaccgcattaccgattgtgttattgcttggtttttcctttgtgtcattcatgttccaattcgaacatcttgtttatttcaggcttgcgctgggtttgttttctacagtggggctgtttctcttatataaaatgaagtcgggattccgttatttcatcatctacctgtatgcaagctggatcgtgcttgcggcggttaccgcgtttgaagagccgattttttcaagctttttctttggcgggcttgtgatgacgatgggttatctcacatatatgctgatttatctcgggcttaagcaggaccgcggcccggaagcagtctgaacgcgctattccatggaatagcgtgttttttttgtacagcctcacagttgcgaaacgagacttgaatctctataatacttattaactttatcggaattataatggggggattccagtgtctttatggatacagaatgaacggcagagggaatggatggaaaaaatcggcctgcttgcagacgaatttcaaaaaacagccgcgcttgatgatgaggcgggccgttttcccgctgagaaaattcaaagactgcgcgacgcgggatatacggcgttaacagtacctgaggtattcggcggtgcaggcatttccgtttatgatatggtgctgtttcaggaacggctggcgcggggagacgcggccgttgctctcggaatcggctggcatttatccgtcatgggtgagctcggagaaggaaacagctgggatgaagatgtcttttcatttatcacagaagaggtgaaaaatggagctgtcctgaacagggcagcgacggaacggcagaccggcagtccgacgaggggaggaagacccggcacctccgctgtcaaaaaagacggaaaatgggtgctgaacggccgaaaaacctttacaaccctttcactgactttggattatatgcttgtgacggcatggattgaagaaaaacaaacgaccggtgtttttctcattcataaagatcagtcaggcgtttcagtcgaagaaacatgggatatgattgccatgaaggcgaccggaagccatgatctccttttagatcatgtcacggtcagtgacgagcggcttgtggagcttatcagcgggccgagagcggcgaaagtgaatggctggctgcttcacattcccgctgcttatctgggcatcgctcaagcggcaagggactatgccgtccggtttgcatccgaatattcgccgaacagcctgaacggaccgattaaagacgtgccggccgttcagcagcgtgtcggggaaatggagcttgaattgttaaaagcgagacagtttctcttcacggcggcgcaaatgtatgatgacccgaaacgccgccctttcatcaaaagcgagctcggcatcgcaaaacatattgtgacaaatgccgtcctttctgttgttgataaagcaatgagaatcaccggcgcaaaaagcctggagcgaaataatccgcttcagcggtattatcgggatgcccgggccggccttcacaatccgccgatggacgatgcggtcatcggcaaattagcggcggaagcctttgagcaataaaaaaagagcctgaaaaaggctctttttatgtatggctgttgtgccggagcagtttttgatgcttgcggtcaattctgtcatagatcacattcatcagcttttgattattcataatggccgccttgttttcttttatcagctgttcgtatgtttttattttacgtttcgccatgagcccgcaccttcctaacatatttgtattcgctttctaattctccgagcgataattcatataaatgccgttccgactttttgtatattccgttattgatcagcaaatggatcagatgtttttttcgtccttcaactgatgatctgagctgaggagaagacctcatgattaccctcctaatcaaatgatattgataatcattatcagttaatgaaagtatacaatgggcatattcatatgtaaagggaaaataccgccaatttttcgacaaaaagtttcccggggaataatgctgtcgaatattgcatttgctcagatcaaagctgctatttttccgcttttccatccatactatgaatgagaatggaggagtccttacatgaatgatcaaacggcaaacttaaaacggggcgagaaaggcgcgattcttaatatcgccgcgtacctcatccttgccgccgtcaaactggtgatcggtcttatttatcattccgaagcgctcagagcggacgggttaaataatgccacggatattgtcgcatcactggctgtgctgatcgggctccggatttcccagcgccccgcggacagtgatcatgcttacggacattatcgggctgaaacaatttcttctttaattgcgtcttttattatgatggcggtcggtattgaagtgctgatcggaggggcaaaggcgattgtcaacggaacggaggccgagccgagcttcattgcggcatggacggcgctcggaagcgcgattgtaatgtacggcatgtatgtatataacagccgtcttgcagatcgggttaaaagttctgcgcttcatgcggcggcgaaagacagccgttctgacgcctatgtcagtattggggcgtttataggcgtcttaacggcccggcttcatctgccgtggattgatccggtcattgcttttctgatcggaatcatcatctgtaagacggcatgggacatcttcaaagatgcttcccactcattgacggacgggtttgatctgaaagatttggagccgtataaacacacggtgaaagaaataaaagaggtcagcaggctgaaggatgtgaaagcaaggtatttggggagcacggttcatgtggaaatggtcattacggtagatccgggactgtctgtgaaagaaggccatgaagtagccgatgaagtcgagtatacaataaaacatgaacatgatgtgactcatgtccatgttcatgtagagcctgaagtcataaacaaagatcgtgaaacgaattaaatatgctgtgataaaaactctgtgacttcttcgggcgttttcgcgtttgcgctgtgaagatgcgctttcttttcaccgtttttaaagatcagaaggctcggtatgcccattacctgatatttgtcggcaagctcagggagctcgtctctgttcagttcataccaatcattttgattatattcttccaaaatatcgccgatgaacatattcatgcgcgtgcagtcagggcaccagtcagcgaaaaatttcacgatgatttccttgtcggattgaataagttcattaaattgttctgttgtactgatttttttcatatgacacatctccttttccatgccattttaatataaaataaaaaggaattacatacaaatgctttcatattcagaatgcccaaaaataattagatcattttctgaggaaagtgataagatagtaaagatgaattgttgtggggggaatatccattgaaaacaagtctaggattggtgtacggcggaaagtcagccgaacacaatgtatcgctgcagacagcattagctgtaacaaaagcgcttaatactgagaagtttgatatacatccgatttacatcactgaaaaaggagaatggcaaagaggcccgctgctgactgagccggtttccaacgtgaaaatgcttcagctggaacaaaacggtgaaagtttcgctctatcagcattgaaccgggaaatgtttcctgaagcgtcgcctgacgaaaaggcgccgatcgatgtcgtatttccgcttctccacggaccgaacggtgaagacggcaccattcagggtctgctggaattgctgaacgttccttatgtcggcaacggggtgcttgcatcatcagccggcatggataaagtcatcatgaagcatttgttcgctcaagcggggcttccgcaggcgaagtacgccgctttcttaaaaaaggactggaaacagacaccggacagctgcttacagcaggttgaagaggagctgggatatccgtgcttcgtcaaaccggcgaacctcggatcaagcgtcggaatcagcaaatgccgaaaccgtgaagagcttgaaaaagccttcgaactggcttttgaatatgaccggaaaattgtggtggaagaaggaatcgccggcagagaaatcgaaatcggcgtactcggaaatgacgaaccgaaatgctccgccgtcggtgaaatcgcgccgaaaaccgacttttacgattacaaagcgaaatatgaagacggcgacacggatttaatgattcccgcgcaagtgacggatgaacaatatgcggaaatcagcgagatggcgattaaagccttcaaagcgattgacggctcaggccttgttcgcgccgatttcttcctgaccaatgacggtcaagtgctcattaacgaagtgaacacaatgccgggctttacgccattcagcatgttcccgctgctttggaaagaagcaggtgtagattacagtgatctgatcgaacagctggttgagctggcaaaagaacgccatgccgaaaaacagctgattaaacatacattttaatgaagacggacactgcctgaaggggcagtgtcttttcccgtaacagacaacattttcagaaagcgaggtgccacctttgataaagcgaactgtaaaacgaatcgcagacatggtcaaaggcacactgacaaatcccgaatttgaacaaacaatgattgagggcgccgcaaccgatacgcggactttggaaaaaaatcagctgttcattcctttaaaaggcgagcattttaacggccatacctttgtgccgcaagcattcgaaaaaggcgtttccgcggtgttgtgggaccgctctgaaccgaatccgccggaagggcgtgctgtcatcctggtcgatgacacgctggaggcgctgcaaacattggcaaaagcttatttgaaagagctcggcacaagggttatcggggtgaccgggagcaacggaaaaacgacaacgaaagacatgcttcacgccgttctcggcacgcagtaccgcgttcacaaaaccgccggcaatttcaacaatcatatcggcctgccgctgactgtgcttgccatgcctgaagatacagaaatcgccgttttagaaatgggaatgagcgcgaggggcgaaattgattttctgagccgtcttgctgaaccggaagcggccgtcattaccaatatcggcgaatcccacatgcaggatttaggctcaagagaaggaattgcggaggcgaaacttgaaattataaacggacttcgggaagacggcgttctgttttatttcggggatgagccgctgctccgccaaaagacgtacacttgccggacaacgacatacggcgcaggcgcggacaatgatctccgcctgaaagaaataaaacaggcggaagaaggcacgtacttcaatatcgacggaatcgaccgttctttctttattccggttctcggcagacataatgtgatgaatgccatggccgcatacgccgccggcatctatttcggcattacgccggaaaatgccgctctgggactgagccgcctgaaggtgacggggatgagattggaactggtcaaaacggacaacggcatctcgatcgtaaacgacgcatataatgcgagcccgacgtcaatgaaagcggcggtcgaattaatcgaaacgatgaaaggctatcggaagaaaatgctcgttctcggtgatatgcttgaacttggtgatgaagaaaaagcattccacgaagaatgcggagctgcggtcaatccggcggaaatcgaccatgtatttacttacggcacactcggcgcattcatcgctgacggagcgcgccggcattttgaagaagggcgcgtcagccattatcttgacaaaaaagaactgcttcacgccatacagaaaatggccgcttccggcgatctccttctgtttaaagcatcgagaggtatgaagctcgaagaaatcgttaaagatttattagagaagaactgaaaaaatactgatcagcattataaaaatatacaaaaatgaagaaactaattcagggtgaaataattctgtccgtatgaaaaagaaagaccgccggctgggaaatcccgtccggcgcgggggctagcctcgttcgcgggaagaatccggtcaggccgcttccggccgcctgaccatctcgccttattgaaaaacacatagtgtaatggtaagattaaacgtaaagtaattcgggctttgtatacgtatgatcctgtcctttggatgaaagggcggtttttagtggtaaatcacgacattactgaaacagcaatcagaaggagtttgaataatttgactataacgtttcaagatttccaattaagttctgatctcatgaaatcaatcaatcgtatgggatttgaagaagcaacaccgatccaggcacaaacgattccgctcggacttttaaataaagatgtcatcggacaagcgcaaacaggtacaggtaaaacagctgcgttcggtataccccttgttgaaaaaatgaaccccgagtctcctaatattcaagcaatcgtaatcgcgccaacccgtgaattagccattcaagtatctgaagagttatataaaatcggacaagataagcgtgcgaaagtactgcctatttacggcggccaggatatcggacgtcagatccgcgcattgaagaaaaacccgcatatcatcgtaggtacgccggggcgtcttcttgaccatatcaaccgccgcacgatccgtttaaacaacgtcaatacggttgtcatggatgaggctgatgaaatgctgaatatgggattcattgatgacattgaatccattctctcaaacgtgccgagcgaccaccaaacgctcttattctcagcaacaatgcctgcgccgatcaaacggatcgcagagcgtttcatgactgagccggaacacgtaaaagtaaaagcgaaagaaatgactgtgtccaacattcagcagttctacttggaagtgcaggagcgcaaaaaattcgatacgctgactcgtcttcttgacattcagtctccggaacttgcgatcgtattcggacgtacgaaacgccgtgtcgatgagcttgctgaagccctgaaccttcgcggatatgcggctgaaggaattcacggcgacttaacgcaggcgaaacgtatggttgcgcttcgtaaatttaaagaaggtgcgatcgaagtgcttgtagcgactgacgttgccgcccgcggacttgatatctcaggcgttacccacgtttacaactttgacgtgcctcaagatcctgaaagctacgttcaccgtatcggaagaacgggccgtgcaggaaaaacgggtatggcgatgacgtttatcacaccgcgtgagaaaagcatgcttcgcgcgattgaacaaacgacaaaacgcaaaatggaccgtatgaaagagccgacgcttgacgaagcattagaaggacagcagcaggtgacggttgaccgtctgcgcacggcgatcagcgaaaacaacctgaacttctacatgacggcagctgcggaattgttagaagatcatgatgcagtgacagttgtggctgcagccattaaaatggcgacaaaagagccggacagcacgcctgtacgcctcactgatgaagcgccgatggtcagcaaacgctataaaaaccagcgtacttctaagcgcagagacggccaaggcggcggctaccgcggcggcaaagggaaaaccaacaaccgttcttcctacgataaaaaacgctcaagcgaccgccgttcttcaggtgacagacgccagaaaaaatcatactaaaacacaggaagcggacccttttacggggtccgcttttttttgatatgccggaaagtgaatcttttttgcaaatcagccgtatttgtatgtatgataaaaaatgggaggtaggtatgttgagagcacagccaaaaaatcgaatcagtccaagcggcttaaaagtctggcgtcttcaggaaatcatcctgtccgccttctgtcttctggccgttatagcagcagctgttttaagccatttcttccattggccgtattggatcaccggagtcctcggcatcatttggatattcggttcagtgatatccgtctatgccataccgaaaatcaggcacaggatctggcgctatgaagtccatgaaaatgaaattgatattcaatccggcatttttattgtcaaacgggtcattgtgccgatggtgagggtgcagcacgtagatacttcacaaggcccgctcctcagaaggtatcgtctggcctcagtcaaaatctccacggcggcaaccgttcattccattccggcgcttgatatggaggaagctgaccggctgagggattccatttcccgtctggcaagggtgacggaagatgatgtctgagccgaaacgtctgcacccggcggccgtgattttgaacttattccatactattatcgaaaccattaaaaacattattctgccattttttctcgtctatattgttaattccaaccacttcatccgcttttacggaggcattgcgctcgccgtcctgcttatctggctgattacggcaagtgtgatcgagtggagaaaatttacataccggattgaggacggagaattcagaattgaagaaggcttgttttttacgaaaaagagatacatctccattgaccggattcaatcaatgaatacgagtgccggcatcattcagcagctttttaagcttgttaagcttcaaatcgaaacggccggcgacgggaaaaacgccgaggctgtcttatccgccattactgtggaagaggcggaacggatcagagcggctgtttttcagcaaaaagcggagcaagaagaacgaggggagaccgaagcggagcaggagccgatgcgcggggaagatgtgcaatccgtttaccgactgtctgtaggtgagctgcttatggccgcctcaacatccgggggaatcggtgtcatcatctcagcggtattcgccctcttttctcagattgatgaagtacttccgatggactggctctatgacaggttctcctttctcaagcatgcgagcatcggtatatacgccgtgatcattttcataggattgtttatcgcctggctgttaagcatcgccggtatgatgatcaagcatgccaactttaagatagaaaaaaaggaacacgaattggtcattaccagaggaattattgaaaaacatcaagtgacaatcccgctccgtaaaatccaagccattaaaatgaaagaaaatgtgatcaggcaattattcggatacgcgacggttgcgattgtcagcgccggcagtgcggggaatgagaaagaaggagcacagacgattctgtttccgatcatccgcaaatcaaagctcggagtgatgctgaacggtttcacaccggattacgtgctggaagaaaaccgaaatcatttgccgaaaagggcgctgcgccggtatttattccgatccataatcttctcggttttcgtgatcatcccgctttgtattctgtttaaaccgtggggatatgcatcgctccttgtgcttcccgtcgaactggtgcttggatatgcctcgtttaggacagcgtcatggtgcataaacggcggcaggcttcagattaccacgaggctggtcgggaagacgaccacgattatgctgagaagaagaatgcagatgtttgaagtcagccgctcctttctgcaaaaaagaaggcggctcgcatctgtggctaccgcagtgaaatcagctcaccacatggagcatgtcatgctgaaggatgtcagcgaggaagatgccgaacgcatcgggcgctggtattcatatgaaaaagcggacggttaataccgccgctttttttgctgcacgcataaaaaggaaagcaaaaatccgcctgccagtccgaacaaatgcgccataatgttaatattagagttgataaacgtcgacagcaccgcgatgataagcagggtcataatcattttcgactgatcccggccgatcagctccttgcggaaaacagtcaaaaacacatacacgccgaaaagtccgaagatcgcgccggatgcgccgacatgcacataatcaagcggttcggcaagatacgtgccgatattgccgatgatgcccgatgcgatgtacacaatcagaaaacggacttttccgagcatctgctcaagcgggggcgcgaataaaaagagagacatggagttaaacaaaaggtgagtgaaattcgcgtgtaaaaacatcggtgtcaccagccgccaccattctcccgaggaaacgccgtaattatagccggtcacagcatctgaccacatcatgacggaatgaagcggcatactgaaaaacagccacaagaacgcctgcagcgccaagatacagctgacggccggataacgtctgataaaagtctggaaattttccgttcgtataaacatcgcaagcccctttgcatctgatttgttacatatatagtaacacgtttatgacataaaccgttttttagtacggacttttaggaggaattcacatgattttcggaatcggaatcgacatcgttgaactgcacagaattgaaaacatgctcagccggcaggcgaggtttccgcaaagaatattgacggaagctgaatacgcccgttttacattgctgtcggacaaaaggaaaattgaatttctcgcgggaagatttgcggtaaaagaagccttttcgaaagcatacggcacaggtatcggcaaagagctcagctttcaggatattgaaaccggaaacgacaaagcgggaaagcctgtgctggcctgcgccaagcttgactgcgcggcggttcacgtctccattacccatacaaaagaatacgccgcggcacaggtcgtgattgaaaggttgtcacgctagtctgcatattagccggaaccccttcatatatttgatagtgcattaagggagacaagttgtttgaggcttttatggtacgcgtccgtccgttcagggcgtaccgttaaagtcaaacaagcgatttcttccctttacatcaattgagaagaaggggttgaaaaaaggtgagaaaaagctttgttttgcttttaacgggactgcttgccgtccttattctttcggcctgcggccaaaaatcacaggaagatatcgtgaacggtttagataagaaggcgaaagaatacacctcgtacaaagcgaaagccaaaatgaccattgaaacggggagtgatccgcaagtatacaatgtggaaatctggcataaaaaaccttccctgtaccgggtctatctggaaaatccgaaaaaagaccaaaaccaagtcattttacggaacgccaacggagtctttgtcctcacgccgtcgttaaataagagcttcagattccaaagcgactggccgaataacagcagccaagtatatttgtttgagtcacttgtaaaagacgtgcagcatgacaaagacgccgtctattccgccaaagataaaaagtacacgtttgaaacaaaaacaaactatcagcacaacaaaatgctgccgactcaggaaatcactttcaacaaaaaggacatgagcccgtcgctcgtcaaagtcatggatacagaccggaaagtgatggtaaaagtcgaattcaaaagctttgaattcaacaagccgtttgataaagactcttttgacgagaagaaaaatatgacgctttcccagatggacgtcgccacaagcgccaagccgtctgattcatttgcggtcaaaacaccgcttcaagtgccggccggcgtcaaaaagcttgaagagaaagatatttcaacggcggacggcaaacggatcgtcatgacttacggcggagaaaaatcattcacccttattcaagaaaaagcccatatcgcaaaagccgcctctgccgtcacgttgaaaggcgaaccggttaatctcggcttcacggttgcggcattatctgatacgtctttaacgtggacatatgacggagtggattatcttctttcatcacaggatcttacaaaagatgaaatggtggccgccgccaaaagcatgcagggacagtcgtcaaaataacgtcaaaaaagaggccgccgctgtcggtctcttttttgattccatttcactttgcagaataattttagtatgataataacaatatgaattgaaaataatgctaggaagtgtatcgaatgaacacagcatccttttacagagaaacgtgggcggaaatcaacctgtccgcgattaaagaaaatgtcacgcatatgaaaaaacacatcgggcaaaacgtccatctcatggcggttgtaaaggcgaacgcttacggccacggagatttggaagttgggaaagccgcgcttgaagcgggtgcctcttgtcttgccgtagccatactggatgaagcgatttcattgagaaaacggggcattacagcgccgattctcgtgcttggcgccgtgccgcccgaatatgtacaagcagctgccgagtatgacgtaacactcacggggtattctgttgaatggcttcaggaagctgcgcgccacctcggaagtgcgacagtgccgtttcatctgaaagtcgacaccggcatgaacagactcggagtcaaaacggaggaagaaatccaaagcgtgttaaaaatcctcagccaaaatcccggtttagtctgtaaaggcgtattcacccactttgctaccgcggatgagaaaaacagagattatttcctcttccagtttgaccgctttaaaacattgatcgctccgcttcctttaaaagaattgatggtgcactgcgcgaacagcgctgccggacttcgtcttaaaaaaggcttctttaacgcggttcgtttcggcatcagtatgtacgggcttcgtccttctgctgacatccaaagcgaaattccgtttcaattaaagccggcttttgcgctgcactctgttttatcccatgtgaaaaagatccgcaaaggggaaagcgtcagctacggcgcaacatatacggcagagaaggatcaatggatcggaacggttcccatcggctatgcggacgggtggctccgcaagctgagcggcacgtctgtgctgatcggcggcaaacggatgaacatcgcgggaagaatctgcatggatcaattgatggtcgaattagatcaatcttatccgccgggcaccaaagtcaccctgatcggcagccagaagggagaaacgatcacgatggatgaaatcgcagggcggcttgagacgattaattacgaggtcccttgtaccattagttcccgcgttccccgtatgtttttggaaaatgagagtataatggaagtaagaaatcctttactgcaagataatacaaacaagtagccgtcatccggaaaaagagaatttataaaacagctttgcttgacgtttgaataatggtatcattatgtctggatggatgtattggtcgtatccgtaagtttggtggaggtgtatgttttttgtctgaatccagcgcaagaaccgaaatgaaaatcagcttgcctgaaaacttagtagctgaattggatggtgtagcgatgcgggagaaacgaagcagaaacgaactgatatcacaagcagtgagagcgtatgtcagcgaacggacaactcgccataaccgtgatttgatgagacgcgggtatatggaaatggcgaaaatcaacttgaatatctcttctgaggctcactatgctgagtgcgaagcagaaacgaccgttgagcgcttagtcagcggaggataatcattttgattgtaaagcgcggcgatgtttattttgctgatttatctcctgttgttggctcagagcaaggcggcgtacgcccggttttagtgatccaaaatgatatcggaaatcgctttagcccgactgctattgttgcagccataacagcccaaatacagaaagcgaaattaccaacccacgtcgaaattgatgcaaaacgctacggttttgaaagagattccgttattttgctggagcaaattcggacgattgacaagcaaagattaacggataaaataactcatctggatgatgaaatgatggataaggttgatgaagccctgcaaatcagtttggcactcattgatttttagtcatattttggttgctcatatagagcaactttttttgttttcgaaaaacataagcgctataataaagagataatcaaacaaaatttgttgttttgtgtcgggaggtcagtgaaacccatgtcgaatcagaaagtgtatcagttcatcattgatcagcatgatgaactgcttgatacttggacagccaaactaaaagaagtaggcaatcaggaagactatcagcttacgaatcacatatgtgaaaatatttgtaaagactatatagacattcttttattatcgactaaaaatgacgaggccacggaagagcagatcagtgaactcgcactgcgcgccgttcagctcggcctgtcactgaaacttctttcagccaccctgtcagagttttggaaactgctttacgaaacgatggtcgaccttaatatggccgatcaggacagagcagatttgattttggaaatagacagctttttcaatccgatcaacacggaaatcttaaatcagtattctatctcctgggaaaaaacggttactttgcaaaaaatcgcgcttcaggaattgtcggctccgctgatcccggtatttgagcatgtaacggtcatgccgcttgtcgggacgattgatacggagcgtgcaaagcacattatggaaaatctgttaaacggcgtcgtgaagcaccgttcacaggttgtattaattgatatcacgggcgtgccggtcgttgatacgatggtggcgcaccatattattcaggcatcagaagcggtgcggcttgtcggcgcgaaatgcctgctcgtcggaatccgtccggaaatcgcgcagacgatcgttaatctgggaattgatttgtcgcaggttattacgaagaatacccttcaaaaaggaattcaaacagcgcttgaaatgacaaatcgaaaaatcgtttcattgggggaataacattgtgagacatccaaaaatcccgatcctgaaactgtataactgcttattggtatccatccaatgggaacttgacgatcagacagctttgcattttcaagaagatctgctgaacaaaatctatgaaaccggcgcaaacggggtcgtcattgacctgacatccgttgacatgatcgattcatttatcgcgaaagtgctcggcgatgtcatcaccatgtctaaattgatgggcgcaaaggtcgtattgacgggaattcagccggctgtggcggtcacattgattgaactcggaatctcacttgaggaaattgaaacggcgctcgatttagagcaagggcttgagacattgaagcgggaattgggggaatagcgatgaacgaccaatcctgtgtgaaaatcatgacagaatgggatatcgtagccgccagacagcttggccgcaacgttgcgaaggaattaggcttcggtacggtggaccaggccagaatcacgacggctatctcagaattggccagaaacatttacttatatgcaggcaaaggccaggtcagcatagaacaagtaaacgacagagggaaaaaaggccttaaaattatagcagaagacaaaggacccggaatccccgacatccgtaaagtgatggaagacggcttttcaacgtcaggcggactgggagcgggacttccgggcgtcaaaaggctgatggacgaattcagcctgcaatctgttgcagaggaaggaacagagattcaagccgtgaaatggcttcggtaggaggttagaacgtggatttcagggaggttatagagcagcggtatcatcagctgcttagccgatatatagccgaattaacagaaacatctttatatcaagcccaaaaattcagccgaaaaacgattgaacatcaggttcctccggaggagattatcagtatccaccgaaaagtagtaaaggaactgtatccggatctgccggaagatgtttttcattcgctggattttttaatagaagtcatgattggctacgggatggcttatcaggaacatcaaagtctgagagatatccagcaggagcttcgttcagaaattgaaattgccgcaaatgttcagcagacgctgcttggcacaaaaattcctgaagaagaagatctggatatcggggcaatcagcgtccccgccaaacagatgagcggggattattatcactttgtcaaagacaaggaatcgattaacatcgcgatagccgatgtcatcggaaaaggaatacccgccgcattgtgcatgtcgatgatcaagtatgccatggactctcttccggagatcggcattcacccctcccaagtgctgaaaaatcttaaccgcgttgtagaacagaacgtggactcaagcatgtttatcactatgttttacgcaaactacaatacgaaaaatcaccaatttacatatgcctctgcggggcatgaaccgggcttctactactctgaaaaagaaaaaaagttttatgatctggaggcaaaaggattggtgctgggaatttctcaggattttgattacagccaatatgaacagcacatggacgaaggagacatgatcgttcttttttctgacggcgtcaccgaatgccgtaccgaaaacggtttcttagaacgcagcgacattcagcgcatgctggaagaacatatggactgctccgcgcaggatatggtcaaaaacatttacgacagcctgctgagactccaggactttcagcttcatgacgattttacgttaattgttttgaaaagaaaggtttaaaaaaacagcagcacgggtaaaaagccattagcacgagtaaggataactttcagaggtgatacgatgaatttaacggtagatatgaaggagaatctttcagatatacaaatcaatatcgctggagaaatcgatgtatactcagctccggtggttcgtgaaaagctgatgcccctggcaaacgaggggaaggacatgagaatctgcttaaaagatgtaaattatatggacagtacgggtttaggcgtttttgtaggcgtgtttaaaacggtgagcaaggaaggcggctctctcaagcttgagaatctttccgaccggctcgtccgtctgtttgaaattacggggcttaaggacatcatcgacatttcggcaaagtcagaaggtggcgtgcaatgagtacatcagttgattatatagagatgaaaattccggccgaaccggaatatgtaggaatcgtcaggcttacgttatcaggggtcgcaagcagaatgggctatacttatgatgacattgaagatttaaaaatcgctgtcagcgaagcttgtacaaacgctgtccagcatgcatacaacgatgaaaataagggagaagtatccgtgcggttcggtgtgtttgaggatcggctggaggttattgtcgccgatcagggagacagctttgattttgatcagaagcagcaggatctcgggccgtacacaccttcgcacacagtcgatcaattgtcagaaggagggctcggtctgtatttaatggaaacgctcatggatgaagtcaaagttcaaagcaactctggcgtaaccgtggcgatgacaaagtatttaaatggggagcgagttgatcatggcacaaccatcaaaaactacgaaactaactaaagatgaagttgatcggctcatacgcgactttcaaacacatgataataaagaagctcaggaaacactcgtcgaggtgtataccaatctcgtcgaaatgctggcaaagaaatattcaaaaggaaaaagctttcatgaagacctccgccaggtcgggatgatcggacttctcggagccattaaacggtatgatcccgaggtcggcaaatcctttgaagcatttgcgattccgaccatcatcggcgagatcaaacgcttcctcagagataaaacatggagcgtacacgtcccgagacggattaaagaactcgggccgcgcattaaaatggcggtggatcagctgacgacagagacgcagcggtcgccgaaagtcgaagaaatcgcagcctttctcgatgtgtcagaagaggaagtgcttgaaacgatggagatgggaaaaagctatcaggcgctgtctgtcgatcacagcatcgaagcggatgcggacggaagcaccgtcacgattttagatatcgtcgggtcgcaggaggaaggatacgaacgcgtcaaccagcagatgatgatcaaaagcgtgcttcatgtgctgtccgaccgcgaaaaacaaattatcgatctaacatttgtgcaaaataaaagccaaaaagaaacaggggacattctcggaatatctcaaatgcacgtctcgcgcctgcagcggaaagcggtgaaaaaactgagagaggccttgattggagatccctccatggagctaatgtaatgattcaggttgaagaaaatgaacatgttcaaactcttgtataccaattaaataaagaaggcaagtccatatgcggcgacagcttttttatgaaggcgaatgaagaagaattagtttgcgcggtagcggacggtctcggcagcggatctcttgccaacgaatcctcgtcagccattaaagacatcgtggaaacgtatgcggatgaggatgtggaaagcatcattgagcgctgcaatcaagcgatgaaaaacaaaagaggggcgactgcctccatcttaaaaatcaatttcatcaaaagggaattgacatactgctcgatcggcaatgtccgtttcttcctgcactccccatcaggcgaagtctttcatccgctgccgatttcgggttacctctcaggcaaaccgcaaagatacaaaacgtatacgtcatcatacgaaaaaggggcgaggttcatcatctacacggatgggcttgaggttccgcatatccgcacctgcttaaagcagggacactcaatagaagatatatcaaaatcacttcatccgtacacaacatccagacgtgatgatttgacctatattctagggcagcttttatcgtaaggctgctttttttatgttccgccgttttttgatacactagagaaagaatgaagagatggaggcttttgtgatatggaaacgttagcccttttgaaaaaacaaatcgctgaagaaacagcgttatcccaaaaacatgtcgaaagtgtcatccgcctgctggaagacggcaataccgtcccgtttattgcgcggtaccgaaaagagcagaccggctcaatggacgaggtgcagattcaggcaatctccgagcggtggcaatacatacaaaacctgacgcagcggaaggaagaagtcatcagattgatctctgagcaggacaagctgacggaagggctgaagcaaaaaatcgaacaagcggtcaagcttcaggaagtcgaggatttataccgtcccttcaaacaaaaacggaaaacaaaagccaccgtcgccaaaagcaaaggccttgaaccgcttgcggactatattctttctctcccgaaagaaaaccgccttcacgacatcgctgatcaatatatcagtgcagaaaaagaagtcgcttcaagagaggaagccattgaaggcgcgaagcacatcatagccgaacaaatctcggatgatcctcatttcagaaagtggatccgccaggaaacgtataaaaaaggaattctcacttccgcggcaggcaagtcagccgcagatgacgagaaaaacgtctatgaaatgtactacgagtacgaagagccgattcaaaaggtcgttcctcacagagtgcttgcgatgaaccgcggtgaaaaagaaggcattttaaagattgcgatcgaaccgcccgccgatcagataaaagcttatttagaaaagcaaatcatcaaacatcgtgaaacgcctgtgaaagaaacgctgaaagaagccattgaggacagttacaaacgtctgatccagccggctattgagcgcgatatccgcaaagagctgtcagaaaaagcagacgcgcaggcgattcatattttcgctgaaaacctgcgtaagctcctgctgcagccgccgatgaaggggaaagttgtgctcggcgtcgatccggccttccgtacggggtgcaaactggcagtcgttgatgagacgggaaaagtgctgaaaatcgacgtcatttacccgcacgctcccgtaaaaaagacagcggaagcccggaaaaaaatcaaagaattgctggaccggtacgaagtcgaggttgtggcgatcggaaacggcacggcatcaagagagacagagcaattcgtcgttgatgtgctgaaagaaacagaacgtgacatttattatgtcatcgtcaacgaggccggagcaagcgtgtattccgcgtcagaaatcgcccgtgaagaatttccggattttcaggtcgaagagcgcagcgccgtctccatcgcgcggaggttgcaggacccgctggccgagcttgtaaaaattgatcctaaatccgtcggcgtcgggcaataccagcatgatgtcagccaaaagcatttaaatgaatcactccgttttgtcgtggagaccgtcgtcaaccaagtcggggtgaatgtcaatacagcatcagccgcgctgcttcaatatgtagccgggttatccaaaaccgttgccggtaatatcgttaaaaaaagggaagagctcggcaaattcacaaaccgcaaagagctgaaagaaatcccgcgtctcggcgcaaaaacatatgaacagtgcatcggctttttgagagtgcccgggggacgggagccgctcgaccgcaccgggatacacccggaaagctataaagagacaaaggcgctgctcaaaaaactgcagctcactgcggatcagatcggaagcgcggacgtaaaagagaaaataagcgcattgccgctgtctgaaacggctgaagagctcggtataggggaaattacgcttgcggatatttgcgggcagctgacaaggccggagcgcgatcctcgtgacgaagtgccgaagcctttgctgaaaaaagacgttctgcagcttgaggatttaaaggaaggaatggaattgcagggcaccgtccgcaacgttgtagacttcggcgctttcgtcgatatcggcgtcaagcaggacgggcttgtgcacatctcaaaactgagcaatcaattcgtcaaacatcctctcgacgtcgtatcggtcggagacatcgtcaccgtatgggtcgaaggggtggacgtgcaaaaaggcagagtgtcgctgtctatggtaaaataaaagcactgcttacgagcagtgtttttttctgtagaaataccagcactgattcagcagtttgatttggtaattgtctttttctaaaaacgctttttgcatttgtttcatcagccaattcggcatggctcattcctcctcagcttttagttagaggtcggttttaactcattgtatgcgaacggtgaattgtcccgttcaatgtttttaaagcggggtgcacttatggataacgaacaacttcaaaagctgacggaagacatctctgcacaggatttcggaaaaccgttccgtcaccgggccttcttcaatgatcggctgaaaacgacaggcggccggtacatgctgtcttcccataacatcgaattaaaccgaaaatatctgctcgaacacggccggagcgagctggaaggcatcatcaaacacgagctgtgccattaccatcttcaccttgaaggaaaagggtacaagcacagagacaaagacttcagagacctgcttcagaaagtcggagcgccgagattctgcacgccgctgcaaacaaaaaagacacaaaagaaaacatatatgtatagatgcgcggcctgcggccaacagtatataaagaagcgggcaatgaatccggaaagatatgcctgcggaaagtgcagaggaaaaatcaaaagaattttttaaaaaggcttgactcattttaatgttctatgttaaattataaaagtcgttgagagacaacgacactttctcaaaaaaataaatgttgcttcttgacacaatatgtcgcatcatttataatgaagaaagtctgattattccacagtagctcagtggtagagctatcggctgttaaccgatcggtcgcaggttcgaatcctgcctgtggagccatatggagaagtactcaagtggctgaagaggcgcccctgctaagggtgtaggtcgcgtaagcggcgcgagggttcaaatccctccttctccgccagataagttctcaaccagacggcccgttggtcaagcggttaagacaccgccctttcacggcggtaacacgggttcgaatcccgtacgggtcaccatttaccttcgttgggctatagccaagcggtaaggcaacggactttgactccgtcatgcgttggttcgaatccagctagcccagccattttatttaaaaattttgaatcacttttagagcgagccattagctcagttggtagagcatctgacttttaatcagagggtcgaaggttcgagtccttcatggctcaccacttgtcacgcgggtgtggcggaattggcagacgcgctagacttaggatctagtgtcttacgacgtgggggttcgagtcccttcacccgcactttcttttcaaagtgctgatcatcatcactagcttatatgcttagtggaaagacagcttcatagcacgcggtcgtggcggaatggcagacgcgctaggttgagggcctagtgggtgaataacccgtggaggttcaagtcctctcggccgcatctcaatgataccaagggtttaaccacctttggtattatttttttatgtataaaatgcaaccctgtagaaaattttatcatttactagaattggagaccactggttaggtcggataaaaagtgttgttgggcaagctatctggatgtaatttatattggtgagtgggtcggaaaacccaacctctatcttaaatatttcccatttaaaaagaagagtaggcaagttgctactcttcatctttttatccactatcttgtgctatttgtgagatggcagctgaacaatgccctaaagggatttttcagcaggaaattcttgttttgatggataaaataagaaaatgcgtggatactaaccatgaaaaagatttgtttgtcagtgacgcctccagtaagaattgaatattctttattctcatcaaagaattttttcactctagagtaattcacatttagcctcacacacatttgattttggtttgcaattcatcgatcttattgagttcgtagtcataatcacagttttcttctaaaacagaaatcatagtttcaaagaaaccttttgcattttttaagagtgtttcaaaaaaatcaagtttcggcagtaatactttttgtttttcatcaatttcaaataacaacatatcattcgatattgatttcattttcaatagaagtggttgatctggaaaataaagtttcactttcttctgtttcaatagcttcttcaattaaattcaaaaaataagcccataattggtcaatcaagtcccacattgtgacatcaagtaattcttgttcaccatattttaaaataatcgctcctgataaatagtttgggtctaactgtgatttcatgttcttaagttcccctgtattgttaagtgggacaaagtaatcgtcaacattcttttttaagactgaaagatcctttatcttcttatttggcttgagaattaatgattgtatataaaacattcttacctctcctatttttccggatagaattgaccgactcttcctttgtgaaagcctacaacatattgctgacccttatacgttcctctaatttgataactgaattttgttcctttttgtactaactcttcacggttttgtttcatgattgattctatcgcatctgcaacatcgaactaacagtcatctctttattgagaaaagattgacgagacttaactgaacatcccataaactaggatgatggcgctctaaaatatgcttcattccacgtttatcaatgagaaatgattgtcctccaaaaatgtatttcctgctttgaaaagtctctaattcgtttacaacttcatgcggctttgctttttttataccatgtgtagcagactggttcttaaaaacttcaagtgcagagtttttataactctccccgtcaattgtgttgaaaggaaaagttcctgaaccgccagccattgcatattgttgttcaaaaacatttggtattttaacgtattcaatccctttttttattcctgtttttgaaacttcaagtgtcttaattgcagcaacttttgaaccggcttttgcaactttggatactttatcaataccctttggaccaactattgcaagaacaacagtgctgccgacataggacacccattttgccctgctgtagctatctccattaatcatatcacgttggaaagtgtcttctatgtcttttgctatgatcttataagtatcgattggatgtaagacggcgttcaccgttccagaaagcgtttcaatagggtgcattgcaagttgatagagacccatcacggtatctttacctgcttcatacattccaactgcaataccttttccgatttcggctttttgttgaagttcttcgagctggcggaaataaactttttggtcaggctccaaattctcgtatccaatttttttagcaatttttaaatactcgtcaggatctgttacatttacaagctgttttttcaaatctttaatttcgcgttttttagcttcctcttttttgatttttaaataagctttagatttcttttcgatatcgccttttttcttatgtatgtcactctcacgataagccttggcattataatgtatggatgaagcgtttttgcccttaccttgttgactcctgtaacttttaaaagtctgctttaataaattgttcgttaggttcagtcattgcatattcagtttttaaattctcgtctgtattgtctattttctcaatagtctttttccgtttgttatcggcggaagagagctcttccttaaaagcctctgttgaaaataaatcaagtggaagaatgtcatcaatatcactcaggatatctttcatagctttcttctgctcggacatcattgcttgtgattttctatatgcgtttgccagttcgtgttctaagaaggattcttcgatatatgcatcagataagctggcatcttccagaataccggtgatacttgtaaagaaagcgattttcatatcaatgaaatcaatccattgatcagctacaccggtgtgatggtgaaaaaatgctttaatattgtttgctcccttcccagagaactcactatcatcaagatcagcaacagccttaaatgcttttttcaaattaatcatttgatttttcaactctttataatcgtttgctcggttttcagcttcagataacaaagaccttgcttcaaatactttcattggacaatcctttcagtaagtttatatctaaatattaccatggataggatgtgaagttcgaaaaaattgttgaagaagaggtaatgaattgaacgtaatgagatttcgagaagtgggattaagggggtttttactcaccaattattaaccataattcattcaaacctatagaaatgatgtaatgtggcgttagaaagtgtaatgaaaacaagctttcataatcagtgatacggatttacaatgttgagggcttagtgaggttaaactcgtggaggttcgactcctctaaaccgcatatacgaaataatccaaaagaccaaactcacaagagtattggtcttttttgttgattgaaattacagattttccactatacctttttcggttattaatactattcttggtactggtgaaaagacgatctatattatagtggctaaagtactgaaagcatcagcaaattgggttgatctcaatccatctaaagccccgcgtaataacgctgcaaatggagcaacgccttttacaacgagctctattttatcctgaaatgatagctattttttatcaagtaaatttatgatgcgttttcctcgtccacctccagcttctaaggaatgatgagctttggcaacatcagataaaaaataaatgctatcaataactggtctgaccttgttggaatctacataagatgctaattcttttagaagttcatttttgggatttgcgctgaatgtgcgaactctacgagaaccgaaagtagttgaagctaatatatatattaaggacgaaaactactttatcatctaatcctgtagacatacaataattattaaggaagaaataaagtaaaggctcagacccatggaaagacaatgagtttgagctttgtttacccaatacgaaactacggggcaggaaccacatttttatttgtacaatgcttaaatgaaaaagcattttcataccactacgactgtgtaagctgagtggggagggcactgctggcactccttgtattttgctaataacataaagtaagttataagaagtaaaggaattcctgttgaaaatccctttactatccctttaagacattgtttcatctttagcaactggttgagttctgatgaataatcatacgatttttacaatcgttctccctcttacttgtccttccaatatttcaggaagaacgttaggaagttgatctaaagtaatttcttgtgaaataaattcctctaaattagatggtttaaaatctgttgctacacgatgccatgtttttaaccgtgtttccattggacaatatacagaatcaatcccaagtaaattaacacctcttaagatgaatggaaaaacagtagttggcagttttgttccagctgttaatccgctaacagcaacggaacctccatattgaatttggcttaagatagaggcaagaggttccccgcctacaggatcaacagctgccgcccatttttgtgaccctaaggctttaaccttccctccataggtcatatcccgtgaaataattgtactagctccaagttttcgtaagtaatcatattctgattctttacctgtactagcttctacttgataacctaaagagttaaggaatgaaacagcaaaactaccaacgccacctgttgctcctgttaccagaacttttcctttttcaggagataggttattttcttctagacgttgaatagatagtgctgctgtgaagccagctgttcctactatcatcgcttctttgagggtcaaattatcaggtaaaggtacaatccagtctcctgggaggcttgcatattcgctaaaaccgccaaaatgagaaacacctatatcataacttgtagcaatcaccttatccccctctttaaagcgaggatcattagaagaaatgactatacctgctaagtctatacccggtataaatgggtactttcttacgattttcccatcggggatccctgcaagcccatctttgtaattaattccagagtagtgtacttggatgtggacatcactttctggtaaaaacgctggagaaacattctttactttaattgaaaattcatcatcaactttgtttacaactagagccctgaattcgtctttcattttataaatcctccaatatgctatcttgatgtgaaacctcttttagtatacccaattattctgaccggtcaaactattttatctggtcagaataattttgtgtggattttatgaactgttgtatactaattgaaggtttagctttctggaggtttattatgaagaaaaaagcagaagaaagaaagaatcaaatattaagggcagctttccaagctgtgtcaacacaaggttataattcagttacactacaaagtattgcagatcacgcaggagttagtaagggcgtcgtgcattattactttgataataaggaagataccctttctcaactacttgagtggattacaaataaaatttataaacatgaattgaaagcagtggattcggaatctacgccactggataagttgaaagcttatgtaaattcaatatttgtctctcccgaggaaaatgaaaagttttacaaggtttatttagatttcttgtctcaggcaacccgaaatgaaacgtacaggaaaattaaccatagcttttatcaacagtgctggggcatcacatctaacattattatttttggacaggaaacaggcgtatttgaccaaagtatagatgttgaaaaagcttcaaaaacaatgcgatctattgtagatggattgctcattcaatggctaatgagtgaagatataaattcacatgaatattataaagagatttgttatcagagctttttgaagcatataaagctcacttaattctattggtttatctccattctttacgtaacagaaaaagacataacgaatctaaaaacagaaaatgtcccttaattaagaagcatcattgtcacatgcaatgtcataaaaatattcagtggtttacatttattgagggtacttgaagaatgaggataccaaatgaacaggttggtatctttatcgttttagctcaccattttttaaccataattcatataaacgtatataaatgatggaaaatgaaaataggaaatgtaatgaaaacaagctttcataatcagtgatacggatttactatgttgagggcccagcgggtgagtaacccgtggaggtacaagtcctctcgtctgtaaaataagaagattgtttttctttttttataagagaccatataaatcggcgattaatgtagtctttaatatgagtataacatttgcgctttcttatgcaagagaagcaccaataggtacggcattgtttttacaaattcaaacgccgagatggaaaacgaaaaaacataatatgacttgtaatttaaaggcttcttgaagcacaaaaaagctctgactaattaatttagtcagagcttttttttatgaagtattcccgagtatctgtccttgtttttttaggcaatactacgtccaattctttatttaaccatgcgagcgttttattacgaagataattacgcatctgttcttctgcttcaagcatgaccaagttaattgtacaagaagaattgctggattcacaggagttgcatttgtctcgataaagcagaccattgcttacaatatttttacattgaaaaatgggttttggtccttcaacagcctctattacatcccaaaaggaaatatcttctggggattttgctaacctgtatcctccctttacaccggggacagaatttacaataccagctttagataatttaccgaaaacttttgaaagaaatgtttctgaaagtccttggaactctgcaaggtcccgaatcccgacactttccttggagggaacatctattaaataaaccagacaatgtaaagcatattcaaccccaacactgtactgcatataaactcacctgcttttgattttaagggttatcacattgtatcttaggagtatttttggtgatagtcaatcataaaacccttctttagtatattatttgttccgtttgacaaaataaactgcagggtttatattaaagaccgaattgatcgtcgattaaattaatctttaatataaaataaaaggagagttttaaatgagcaaaacacttatcattaatgcacatccaaaagtggatgatacgttgtcatatagtttacgggtaatgaaacactttttggaaacttacaaagaattaattccagagagtgaagagcttgagcagattaacttgtatagtgatgaagtgcctatggttgataaaacagttttaagcgcatgggataaggctggaaagggcgaagaactgacaagcgatgaacaaaaagtaacagaacgcatgacagaagtattgaaacaattcaaaagtgcaaaaacgtatgtcatcgttttgcctttgcataatttcaatattccatcaaaattaaaagactatatggacaatatcatgatcgcacgcgaaacatttaaatatactgacactgggtcagtgggtctgcttaaagatggacgaagaatgcttgtcatacaagccagcggatcaatttatacaaatgatgactggtatgaagaagttgaatactctaataaatatttgaaatcaatgttcaatttcctcggtattgaggattatcaaattatccgagtgcaaggaacagctttactaagtccggaggatgttttacaaaaagcaaataaagaagttgaagaagctgcttcaagattagcaggtaaataaggtatagcatgaagatcattgttgccggggggactggagtaattggtcggtcccttcttcctaaattaatacaaaacggccatcaagtatttgcattgacccgaggtaatcggtcgaacacgttcctcaaaagaataggggtaactcctgtaaaagcagatgcaatggatcgagatgctgttcttaatgtttttaggaaaattcaacctgaggttgttgtccatcagcttacctctttaacaagttacaatcttatagaaaacgcgagaatcagaattataggtacgagaaatattgttgatgcgtgtcatgaagttggagtgaagaggataattgctcaaagtctttctatggcctatgaacccggattaatacctgccaatgaagatgtccctttagatctcgacgcaccgaatccaaggaaagtaaatgtaattggagtggcatcattagaatccgcagttgctgaattacccgagtatgtcatcctgcggtatgggctgctttacggatcaggtacatggtatgaaaaaaacggaatgattggtcggcaggtattaaaaggagaaactaaagccgatgatagcatcacatcatttttacatgtggaagatgcagcacaagcctcagttgaagcattaaactggccgaatggaccggttaatattgtggatgatgaaccaacctcgggaaaagaatggctcacgctatttgcgagcgagatcggagcaccaaaaccaatatttatagatggaagtgaacgaggaaaacgtggggcctcaaatggaaaagcgaaaagagaatatggttggaagcccacttatccatcttggcgtattggttttaaattattagccacttaataattcagagcgagtgtaacttcataattaaagccttggatttttcattaatatggaatttcttcacaaaggagagagacttaatatgtcgaaaattttatatattaccgctaatccaaaatcagttgaaaattcagttggtcatagggtaggacgtgcgtttctggaatcttatcgtgaatctcatataggggatgaaattaggacaattaatttatatgaagatgaattcccaataatcgatgaagatatccttaatggctgggacaaattgcgggatgagggttcagagttaaggcaagtagagaagcataaaattaacgcactcaataatttcactgacagggtagcaagcgctgataaatttgtatttgtatctcctatgtggaactgggggattcctccaaaattgaaagctttcatcgattcctttgttgtagtagggaaaacatttcactacactgagaatggaccggttggtcatctaaaaggaaaaaaagctattcacattcaggtgagtggtggggtttactcgcatgaaccttttgcgaaaatggattatagccacccgtatttaaaacatgtacttaatatcattggtatacaggatgtagcagtattatatgttgaaggacatgaattcaatcgacacgaagcgaaagaaattattcacaaaggtatatcagatgcgagaaagttagcaacaactttttaatacaaatcaaataaatataaaaacatattaaaggggagagaatttgtaatggctacgaatattagaaaagctgaagctaaggatattgaccaattaactgagataatgtatgaatatatcgttgatttttatcagagaccgaaaccttcaattgaaaaagttcaccaacttttttatacacttcttaatcaaaaagaaggtatccaatttgttgcagaacaaaatgataagctagttggttttgctacattatatttcacttacaatacactatttgcacaaacaacaagtgtactaaatgatttatacgttttggaagatgcgagggggacagatgctgcgaatggcctcttcaaagcatgtgaaaaattttctaaagacaatgactatgctgatatgttttggctaactgctcatgataataaacgagctcagcgtttttacgaaaagatgggtggaactcctgaaagatgggtcccttactcaattcaattttagtaaacgacattaaaacattgcaagaatatgtatcaatgggaatctgaaaaaatgaaattacgagatttaaattaatggtgggaagatgatgtgttaacacatgggctgggcttatggaactggagatactaaattgcatggaaaagaactgctcttagcgatctccttaggcgcacaggaatctgattatcaagcaggcggagaatataatatcacgatcagcgagcttatcagaccgtttcaagtcactgctaactatataggaatgcgttttcttcctgcctttacacaatatgggacacttcacctttcaaaagaagatgttaagaacagtgcggagaaattggttgactatcttaaagctgagcattgatccggtattcgcgagggaagctgaaataaatgatgtgaaactaattacagcagggcgatgagagtgcatatttcttgatgaaatgcagatttccttggtctctaataggtgcccggtttgtgctcagaattcatgaaaaataatgaaaataagtataaataaaataaacagatgctttgaataaaagtttggcccagcgggtgaataatccgtggaggttcaagtcctctcggccgcatctcaataataccaagggtttaaccacctttggtatttttttgtgcttatttttaaatgatctactatccacaaactgcccacttacctggagtaagtcatctgcagtagacgtcgcacaaatattttcattatttatagatagttactaatgcttcaaactccaatttgcaaaagtagagaaagtattgctaagcatggaggaaaacaaagatgccttgttatatgatcagctattagaaattagacacgagataatagggtaggggcataagggtactgaaaaggcttaatcttttttaaaaggttaagccttttttttggctataaatgtaatcggtgtccaattagttgccctgaattcatgaaaaaggataaaataggtgtaaataagttgttattttaaaattagaatcaattctttatcacaaaagcaatagtaactaatcggcgaagaaaggataacagtcaaatgaaaacattagttatcgttatacaccctaatttggaaacgtctgttgtcaacagaacctggatgaatcgtttaaagcaagagaatgacattacggttcatgacctgtacggtgaataccctaattttatcattgatgtagaaaaagagcagcagctcctgttagatcatgagcgtatcgtttttcagttcccaatgtattggtacagcagtcccgcgttactcaaacaatgggaagatgatgtgttaacacatggctgggcttatggaactggaggtactaaattgcatggaaaagaactgctcttagcgatctccttaggcgcacaggaatctgattatcaagcaggcggagaatataatatcacgatcagcgagcttatcagaccgtttcaagtcactgctaactatataggaatgcgttttcttcctgcctttacacaatatgggacacttcacctttcaaaagaagatgttaagaacagtgcggagaaattggttgactatcttaaagctgagcattgatccggtattcgcgagggaagctgaaataaatgatgtgaaactaattacagcagggcgatgagagtgcatatttcttgatgaaatgcagatttccttggtctctaataggtgcccggtttgtgctcagaattcatgaaaaatgatgaaaataagtataaataaaataaacagatgctttgaataaaagttttttgtaactcatgataggtttttactaggttgagggcccagcgggtgaataaccagtggaggttcaagtcctctcggccgtatcaatgataccaagggtaatagagagatccttggtatttttttgtgcttatttttaaatgatctactgcccacaatctgcccgcttacctaaagtaagtcatctgcagtagacatcgcacaaatattttcatcattataggagtattgctaagcaaggaagaaaaccaagacttcgaggagaatgtttgctgatgttaaaaatttttcgattgaagtcgctgattattttcatgaacgaggaagcttaatgctctctaagaaaattaaaaaaggagagattattgatgaaaatcagccggtgtctattggctgcagtgattttaggtagtgtgttttcaataacttatttgcaaagtgatcaaaatactcaaactatctggacaatactttgcttggtcttatttgtcgatagtcgccgtaacgaaagcactaaacaacacattaaagagattcttttgatatgacggacacatatgacagtttgcgattgtcaaaattcaatttttaatctttgttcaacttaccaaggtcagttaaaattttgttaaaattgtgataaatgtatgaaaggattaaatgttcatatcgaaacatttggattacagggaaggggaaacaaatacatgtcgatttaccataaagtaattggagagggatacccgatcgttatgttgcatggttggacacttgaccatcaggtgatgttaaatgcaatggaaccgttattcgagaaacgaagcggttggaagagaatatacatagacttaccgggtatgggacattctaagccgcaaccgtctattcagaactctgatgatattttagaagcgatattgcgtcttttggacgagattattcctggtcaacagtttattgtgtgtggtaattcatatggagggtacattgccagaggtatcgttcgttcacgtcaggaaacagttcgtggattactgctgatggcaccattaactatacctgaattcgatgaaagggtagtaccgcagaagactgttctaaaaagagacagcgacttgatatcacaattgtcttcagaggaggcggatgaattttgctctatggggattgtgcaaggtaaaactgaatgggagaggtttcgagatgaaattttacttccttctaaacaaacaaattatgaattcataaacaacattcgtcaaaatggatatgggtttaccttcgatatttcatctaaacttgagtatcccacgctaattatcacaggacgtcaggacaatgtagtcggataccacgatgcgtggcgactactcgaagattacccaagggcaacttttgcagtacttgatatggctggtcacaacctgcaaatcgaacaaaccgatgtatttaattcattggttcataactggttaaacagacttaagttggaaaattttcagaaggtataacttttcataaatatgagtttactgttacaattaccagttagttaaacaaaattgagataatgaatattgggatttgctaaaattttagttattattagtctttattgtcattggggataatttaatcattgaatttcatgatggagaagtaaaattaaatgaaggtgaaatgtttgtcattccgaaaaatgttgaacataaaccttatgcagaatcagagtgtgaaattttgcttgcagaacctaaaggtgttgtgaataccgggcaagaaataactgatcaaacagctgaaaatgatatctggatttagctgtaagaaatagccgatcaaaaataaatccattacctaagaaatgtttctttatttccagctggatttaaaaaataattttgttaggtgtcatgcaataaattcaattgtcggtgattggcctgtttaaatgcatccattatttcatacccggtgctacttatttctgttgtagtctgcatactgattaataggtaaagaaagtcgaaaaggtatacgaaattcttcatacaaattaaagttttgaatgaaagagcaggattactcctgctctttttctttctaattgggctggattaaacacagacggttattccttgggaaaaacaaaaaaatttcttctatccattgactagctgggctttagccgggtttctatcaccctgttgggcttgtcagattttaaaaaggtatgctacgtttatagtgttttgtttcacctgattgtggggtaataaagatagaatcagtaaataattcttaggaacgacctcgatcttataataaacatattggaagccgtaatggaagaactaaaataaacgtttaggatactttggagaaataaaagtttgttttcgaatgtgataatattcacaatagagctgtattaaggggggaatcatttctccaaatagtctgcagagaatgccaaccacagcccaaggatatatcactaaccgctttggctggtattatctgttggatgtttctctttttgttgctttttgtattatttttagtccaatcggcaaaaataagttaaggaaaccagcgaaaaaactgaatttcatccttctttcctggtttacaatgttatttggcgctgatatggatattagtctagtcttttaaagtacagttgaacctatcatccactatgccgttagctctccatcaggtgaaacagaaacccccagacttttagagaagcattacgctatacattctgggactgcatgcttggaccgtttatgcgcttgtataatgtggatttgataattaaggagtcgatattattaaatgaagtttaacaagaaaaaaattaacgttgtagacattcaaaaagcgaagaaaagcgtgtttgctacagggataggaaacgcgatggaatggtttgattttgctttatattcttatttggcagttattattagtaaaaactttttcagtccagtacaaaacgatgaattaaagttaatatttacttttgctacatttgcaattgccttcttacttagaccggtaggcggaattatttttggtaaaatgggtgataaatttggtcggaaaatagtattaacaattactattttaatgatggctttatctactttaataattggtgtgcttcctacctatgatcagattggtgtatgggcccctatattattactattagctcgtattctgcaaggtttttctgtgggtggagagtacgctggtgcaatggtatatatcgcagaatcttctccagataataagcgtataaggttaggcagcggtttagaaatcggcacattatctggttatatagtagcttctgttttagttacagtacttttctggactttatctgatgttcaaatgaatagttggggatggagaattcctttcttcttaagtattccaataggattatttggtttatatttgagaagtcatttagatgaatcaccaatttttgaaaatgacatctctgaaagccaagaacaacaaccaggtttattagaagtcattaaaacatataaaaaagatatctttttatgtatcgtatttgtggcatttttcaatataaccaattacctattgttaggttatatgccttcttatttagatgagaaccttggtataagtgataatataagtacaccggttacagcaattgtattgattattatggtaccgttcgctttaactttcggtaaactaggagataaattaggaaataaaaaagttatatcaattggattagtattaggaattgtattttcgattatctcttttcaatttcttaatatggggaatataacattcttatttataggacttttaatgttaggtattgtattatctgtatacgaaggcactatgccaggatctttacctacgttgttccatactgacattagatatcgtacattatcctggacattcaacttatcagtttctatttttggtggaacaacacctttagttgcttcttggttaacccatgtgacaagaaacaatttggcgccgggtttctatttattagcagttagtttaattggcttaatagttgtgttaaccttatttaaagatacttcaggtaaatctttaaaaggttcttacccaacagttgcttctaaagctgagtttcaagaagctgttgaaaatccaaaagatgcactgtggtggaaaatggaacaaacagagaaggaatgaaaaaaacatccatttaattgaccgactactcgaaatacagactcagaataagctgggattatccgagcagcaatgactgcagctcttttatattctggagggcttactgctttgcaaaagcagcgttgctattctcgatcgtcattattttattggttgtgtcctaataataaaacattgacgcaagaacgaagagaaattaaaaggtccgagcaatacagcaaaataagagcaagaagctttgttatgccagttcttctcccgaaggagagctggctttttattttctatatggggtccaaagcagaaaacgagaacttgtacgctaatcacagtatttggttcttcttgttttatgggagaaggaaaaaatatctgttaaaggtttaggcgaagaattatatctagactccggaacattaactccagttttaaaacgacttgaggagcgaggtcttattataagagagcgttcaaaagaggatgaacgaagtgtaattattacgttaacaactgaagggaatgagtttaaagaaaaagtcacattgattcctaatgcagtatttgataaaaccgattgtaatgaagaagaaattaaaagttataacaaggaaattcgtaatttacttaacatgctgacaactgagcaatagttttatgaatatagatgggcgggcccagcgggtgaataacccgtggaggttcaagtcctctcggccgcatcaatgataccaagggttttgacacccttggtattttttgtttataaaaattcacctgttactgtccacttacttatagtaggtcgtatgatttgtcagtcaccttcatccttctgctgactgcgtgcggcggcagtaaatatgataatgcaattaatgaagtgatgaagcaggagaagaaagtcagaaaagaaatgcgagcagattcagatgagcacaaaagagataacgccataattcgtgtatatgatgacgggaaatatattcaacttgcgttttatcagccagaagaaagttctcgtaggctgactgcttattcttattatgagaagcttggagattcttatgaggaaatggcacatatgccgggtgatggtgatggcgaccgccttggtctgtataagaaaacacctgattataaagaggttaaaggcaaggaaacaaaaacaatgtgcttgttcattcctgataggggaacaattgttttaccgttaagttgttgtgtgagagccagtatgttaaaatgctacgtagatttaataataaagtttagattcaaggagatttatttatgaaattggatgaattcaccatcgggcaggtttttcaaactaaatcttttgaattaacaaaagagaatataatgaattttgcagaagtgtatgacccacaatacatgcatttaaatgaagaaaaagcaaaaatgggcagatttaatggaattattgcttctggaatacaaacgttatctattacttttaagctttggattgaagaagggcgtcatgaagacgatattattgctgggacaggaatgaataatataaaattcctagcacccgtttaccctaatgataaactgcacactattgttaaggttattgataaaaaaccaaataaaagccagacggggatacttactgtattgttatctacctataatcagaaagaggaaaaagtgtttgaaggtgagttatcagtattaattaaacgctaaatgacctttgcggcatatcatcgtcacctttcattttttatagatgtctggatgaagtgagcaatcatcttaattaattgagtggactttgtgtttgctctttttttatttgttcaacctatgtcaagaaacaaaggactaacaataacgaaaaaatcatctcgtaaatacgaatttaaaaatagctgccttgaggtttttgcatattcctctgtatcattgcaccgggtgaatatctataatgagcgttctatccttcgatgttatgtttcctttttactttttggttttgtcagttcaaagctgtactttaccatgtcatggatttggtgctctgggagtccctcatctaaggtaagagtattccaatgctccttgttcatatggtatccgggcttgatttcttcaaaaagaccacgtagaaaatcagccctttcaggttcgcatttaaggttgacacataagtgttcgtcgcgagtgaagataagtgcaaatattttcttattccctttgtgacgaattgcagtccaaccatctccgaaaggatggtcttcataagagtttggaaaggttaggcagtaatctttaatttcatcataattcattatcaattcactccatacctcattatttttatatacagaacatattcgttcaaactaagatttgcggtttcttttataccaatccgagatttcctcaaatctttgtttgaacttagcttctgaaccttgagttgttggatagtaatactcaacgccctattaaagaatctggcatcgtctgcattgtcgttaatttttcctttttatcatgagcatatttatatcccttaccgtaatctaaatctttcatcaaaaggagcagactttatgtctgctctttttttgttcatgaaaaagccatttttttatccccagtctgataaaagattttctgtgaaatcatttaacaattattggtcaacttttctttttcaataatatcctttaccacatcctcaattgtgatatgcccaagagctttttccaaggcagattgggcgatttcaaatattggaccaattgtactttgaatgttccggcctacaggacattgaggattgggattttcatgtatactaaacaattctttatcttgaacaacattaactgctctataaacatcaagtaaggtgatttcagttagatccttcgctaattcagctccggcaatacctggccgaacatttactaaacctgcttttttcagcatccccataatttttcttatgaaggcgggatttgtatttacacttccagctaaaaattcagaagtgctaattccgtcttcatttatttcaataagagccaatatatgaattcctacagcaaaacggctgctaatagacatgatttcttcaccatcctcattactttacactctttatagtacacttgtaactgaatgtattacaagttcttttactctaatatgctcaattaacaagatgataaaagtattgacaaataaatgaggtgtaactaaaattattacatgtaatcaatatggttacatttaaaattttgaattattaggaggactttaaattgaaaattggaatcattggtgcaaccggaaaagctggaagtcttatcttgaaagaagcggtaagcaggggacatgaagtaactgcaattgtaagagatgctgcaaaacttaaagaggaaaagattgcagtcattgaaaaaaatataattgatcttacatcggatgatctaaaaaagttagatgtaatagttaatgccttcggtgctccattaggagaagaacaggcacatgtagatgctggccgggcattaattagggcattaaaaggaacgggtgcaagagctgtaattgtaggtggagcagggagtctttatgtagacgaaaataaaactgtcagtgtaatggatacacctgatttcccggagatttttattccgacagctaaagggcaaggtcgtaacttgcaagaactaaaggaaacttctgatattaactggacatttatcagtccttcagcggtatttgacccagacgggaaaagaactgggttttatcagtcaggaaaagatcatcttcttgtgaattcgaaaggcgaaagttatatcagctatgcagactatgcaattgcagtattggatgaaatcgaaaatccaaaatatataaatgaacgctttacagttgttggagaagctgaataagtgattgagtagaaacaaaggggtaccattagtgtcatcgctaatggtatcttccttctaagaatgtacggagacattgaaaactttgcaaacagagcagctgattatttttatgaaaaaggggatttatcacgttccaatgagtattatcgagctgatgacagagtaggtgctttgtgagttggaccaaaaaaatatgtataaaaagctctgactagcaaccttttggattagttagagcttttttatttgactgtgttacccagtgtaatcctccgtattgtttaatacactttagtttgaaaatccgggaaactcttctacagttcctagttcgtgtctaaagtgtgaatattccagcggggaactttactgaaatgaggggtattttcgaaaacacaccagtttgctctatgacctgccgtcaatgacattaaagaaatgatttgatgaaaaataaaaaggagcgatattcgttaaaattcaggtagtagccatacatagccatataaaacacataattaattctaaattctttactgatcgttcttaaatttgatatacttgaaatacgttagatctaactgttttgctactcaaaagagaatgatcattctttaattatttcagaatgagggagggatgaatgaatgtataagattgtgcttctagtacatcattgattctcagtcctttccctgaatatgttcgaaggtgggattacatggctagaaataaagaatttgatgaaaagaaggcattaagaaaagcaatgattcttttttgggaacagggctatgaaaaaacatccatgcaagacttggtggatcatatgggcgttcaccgcagaagtatttatgatacatttggcgacaaacatactttatttatgcgagtcttaaatcattatgtagaaataatggaaggccgaatgaagaatgaagtgaaaacagaattaacagtgaagcagtcgatacgaaaattatttgaaatggtgattgattcgacacaacagcagccaaaaggttgtttagctgttaatgcagctgttgagttatccctaattgatgaagaagtagcgaaaaaaacgacagagatttttataaatacagaagccttattatttgatctgctaaaacatggtcaagatcaaggtgaaattcctaaacacaatgacatcaaagggctttctcaatttattcataattcactcgtaggaatacgagtattaacaaaaacgacaaatgataaagagaaattagaaagtattattaatttcactttgtcgacactagactaaatctattttgtgatatcgattagttaattaaaaatatggtttcgaggagagaatgatatgaaatacacagttattacaggagcaagttcaggtataggatatgaaactgcattggaatttgctgctcgcggcaaaaacttaattattgtagctagaagattagagaaattagaagggcttaaatcagtaattcataatataaatcctgatttagatgttattattcatacaagtgacctatcgataacagatcaggcatacacattgtataacagtttaaaggagtatcaaattgagacgtggattaataatgctggtcttggtgaatcttcttctgtgacggaccagaatttagagaaagtagaatccatgttacgtcttaatatagagacgttggcgattctttccacactatttgtgcgagattattctcatgtagagggaacacaattaattaatgtatcctccgcacttggatatgcgacttatattggtggtattacctattctgcatctaaatattttgttagtgcatttacagaagggcttgcaaaagaactggagcttaaaagtgcaaaaatgaaggcaaaagttttagcaccagcagtgactgaaacagaatttgagaaaactgcacaggatgtagaagaatttgattacaaaaactttatgccaatgtatcacacagctaagcaaatggctggttttatgatggaactttatgacaacgataaagtcgtaggtattgtagatgaaagctacaatttcaatttaagagatcaaatctatccaatactaggcgtttaatgtattaacaaaaataacgtgttggggtggctgataaacataggttctttgcagtagcgattcaaaaagtttaattatttgagaatgaacgttctaaaagacaacagtcccaattgaataaaaagataattttgtgagtatttaaggtttaggtggtgggttgatcttaaaataaggttccctccacctaaacgattggaataatataagatctttataaaaagaattatattgagggtagaaaaatgaagtagacagtgaaaataataaaaataaggtaaagaaacttaataaaagcaactcaacggaagggtgctaataaaaatggaaacactcatgagagcagctcagatcaccaaatattcaaaaaatccccatgtccaaattaatgaaattccaattccagagatcgctgacaatgaagtcttggtaaaggtcaaagctgcggcggtcaatccactcgaaatgttaattattacaggtagcgtgaaactgattcaagattatgaattcccattaacgcttggtaatgaattgacaggtgttatcgaaaaagtcggaaaaaaagtgacagaatttcacgtaggagatgccatctatacacgtctccctctcgaaaaaattggtgcttttgcggaatatgctgcaattgacgctgccgcaattgcacccatgcccaaaaatttgtcttacgtggaagccgctgctgcaccactggctggactcacagcgtatcaaggtctacatgaagaactggaggcagagtcaggtaaagctgttttcattccaggtggatcaggcagctttggtcaaatggcggtaccaatcgcaaaggcaatgggcctaaatgtcattgttagtggcagctcagaagcgcgcgaacgcactttggaaatgggtgcagtccaatatttggattatacaatagaaaactatgttgacttgttgtcgaatgtgaattacgtaattgatacattgggacctaaagaatttgacagtgaattgagtatcatcaaaccgggcggaagattgctctctctccgtacaggaccaaataaacgtttcggaaaagaccgaaatttcccatcgtggaaacaaatgctattttcccttgctggcgcaaagtatgatcgcaaagccaagaaacaaaacgtggaataccattttatcttcgttcgttctgacggcgcacaacttaaagagattaccaaaatcattgaagaaaacaacattgttccagcaattcatccaacacaattcaacatagacaacgtaaatgaagcgctagaactagtcgcaaatggacggccaaaagggaaagtgattattcaattttaaggggaatacgaagaaagcagtcattaaagttgagattgtttatgcaaaggattttgaaaggcaataataaggtgttacaaaccgcgagttctgctgattaagaaatggaaagataaaaacctagatcaaatcatagaaaaacttcatcaagccggagttcattataaaacatggagaactagctatttcaattgttcttataaaaaatgttgaaatgtaattaagttaggcggttactctaatagacatgtcaccagtaacaagacattaactgtcttgaaatgaaaacctactccatttttactcccaaataaaaataaatcgaagtgaacactcataatcaaaataaacaaatgctgatattataggcttttgtaattcataataaagaatcactttattgtgggcccagcgggtgaataacccgtgggttcaagtcctctcggccgcataccaataataccaagggtttgaccacctttggtattatttttttgtgcggaaaatacagctatgggagaagacttgcttaccaaaactttctaggttgagggcttagtgaggttaaacccgtggaggttcgactcctctcaaccgcatatatgaagtaatccaaaagaccaaactcacaagagtattggtcttttttgttaattgaaattacagattttccactatacctttttcggttattcatactattcttggtactggtgaaaagacgatctatattatagcggctaaagtactgaatgcatcagcaaattgagttgatctcaatccatctaaagccccgcctaataacgccgcaaatggagcaacgccttttacaagaaatgagcgtccattttatcctgaaatgatggtttattttttatcaagtaaatttatgatacgttttcctcgtccacctccagcttctaaggaatgatgagctttggcaacatcagataaaaaataaatgctatcaataactggtctgaccttgttggaatctacataatatgctaattcttttagaagttcatttttgggatttgcgctgaatgtgcgaactctacgagaaccgaaagtagttgaagctaatatatatatgaaggacgaaaaactaggaaatccaatagtaaccattctaccgttctttgcaagcaagcgcctataatgtttgaggtcagttcccactgtgtccatgactacatcaaactttttaagatcagtaggagatgtttttttataatcaaatacttcgtctgcacctagctcttgaagaaaagtaagatgtttttcgtttgcaagagcagttacatgagcacccaacattttgccaatttgaatcgcaatgcttccgactcctccacttgcaccacgtacaagtaacttttcgccttttctaagtttcgttttatattttaaggcaataattgcagtaacacctacaccaggcaatgccgcggcttgcaagagatcaacctttgtaggaattttagatattttctcaggtgatatagctacatattcagcggcactaccaatttggctccttaaattcataggaagaactccccacactctatcacctaattgataattttttacgttcgatcctacctcaacaacctcaccagaaaagtctgcccctgttccttttgggaattgattacccgttaatagtttcagcttgcctgatcgaaatagcgtatccatagagtttacactcgacccatgtacacgaatgagtacttctccagtttctataacaggttttgatatagaatcttcaaaaagaacattcggtgatccatatttagtatattgtgcagcacgcatcttttcacttttcatttactcactccatctccttgaaaaagtataaacttgaagggttttatgatcaatttagctctctaatacatgggtgacagggtttacatatttgattataataaatggaaaagatttaacaagtactcaatataaactgactaagtaaggaaaaactgactaaggagtggataaaatatgactgaaagtgagctaaataaagcgatagctccagcaagttatgcattaaatatattagcgggaaaatggaatttaaaaatcttagctgtactatgtagttacaatgatattcgatataatgagttaaagcgtaaagtgtatggaattacaggaacaatgctcaatcaatcattaaaggatctgattgaattcggaattgttcaacgagttcagtataatgaagttccatcaagagtagaatattcattgactagggcaggactagagctgaaccctatatttgaacaacttcttttatggggcgaaaaccaattagaaaaatcaaagtcataataaaatgaatatacaaagaaaacgatgatcacgagtagaataacaaaataaaaattaattttaaataaatgttttttatttgtagaagagattggcgaattcatttcaattataaactgatagaagtatgaacaaggtgattcaaaaacgaacgttttgacaatattaatatgattgttcgatattataataatgattattctttggagggtttccgagtggtgaagtattagggaattttaagtcttcaagatggctgataaagtaataaaaacgagtaaatgtgtgcaatggatataagtaaatgaaggatataacatggatgcacccaattgagagcccagcgggtgaataacccgtgggttcaagtcctctcggccgcatctcaatgatacaaagggttttgacacctttggtatttttttgttgtaagtgcatgtggcattaaaaaagtgctgacctctgcacaaaatctttgcgcgagtctgcacttttattatgcaagatacactgcccattatcatcgattatgggcgtttatttaatccgttcttagccgagctgatacctggcttttagaagttttttttaagtgggtaaaaccaacaaattttttgccttcttcatcccataggcggaactttaacgacttaatacttgttgccagtgtgatggtcggaacgttttgcaatggttcggtgttgttatgcacgatttcaagcttatagtttgggactcttgggcttaaatgatgaacatgatggaaaccgatattgcctgttaaccattgcatgacttttggaagcttataaaaagagcttccttcaacggctgcttttacatattcccaatgctcatcttcttcgaaatatgaatcctcaaacgtatgctgaatataaaacatccaaattccgagggatcccgagatcataaaaattggcgtctggaccagcagaaaggtttgccagccgatagcccaacataaaagtgctgccaaagcgacgatccccaggttggttacatatgtattcatccgttctttgcgttttgctcctttacgattaaaacgattggtaatcccgaagacgtaaatcggtccgataataaacataacaaacggatttctgtacaaacggtacattatttttgtcttagttgaggcttctttatattcctcaacagtcagtacccaaatatcgcccgtaccgcgtttgtccaggttgctgcttgtcgcatgatggacagaatgatcgtgtgcccaatgatcaaacggatgcagagtcagaattcctgttattgttccaaggattcgattcgcctttcggttcttaaaaaaggaatagtggcagcaatcatgaaagatgatgaaggttcttactaaaaaacctgctgcaacgacagaaatggctaatgtaaggaaataagaaatggacaagctcttatatgccaaataccatagcaggaacaatggcaccaatgtgttaacgatttgacatatacttttttgtaaatcggacttttcatagggtgtaaccagttttctcaaagtccttaggttttgttcattcattttttaaaaatttccccttccctgatgttcttctatgtatcgaaaacgtttgtctttgaagtcacaccgtcatacaccatagatgataagtatctttcccattcgtttgtgaaattattggaaatgagatacttttttccaggtcgattaaatctttattagcagaaccagccggaattcaaaaggtgtatgaagattatacccagctctttatcgggccaaactctctccatgctccccaatgtgaatcggtttatttagaccgtaaactttgattgtttgaggaacaaacatgacaagttaataccgttaaaatagaggtatacctgagtgatcgtttggaaacatctgcagaaacaaatctgtaccagtgaacagccaagaatatcttgtacttgaacaagaaacagctgagccttttaaagaaatctttaacaatcaatatgaagtactgggtttgaagacactcgtgattcattttcacggtgttttcaaaccatagctattaataggcatcttattttgcactggtatcgacaggtttaacaaataaaacatgaatgaacacattattaatttgcagttatttccgtttcgtgctatgataaaggagaattatttttgttcgtgtaaaggatagtatgaatatcgacttttcgtcttgatgatactttgggcaaggatagtaatacaatgtgtaacacactaggaggcaacaaaaatggaacaaggtacagttaaatggtttaatgcagaaaaaggttttggatttatcgaacgtgaaaatggagacgatgtattcgtacacttttctgcaatccaaagtgacggattcaaatctttagacgaaggtcaaaaagtaacgtttgacgttgagcaaggtgctcgtggagctcaagctgctaacgttcaaaaaactgcttaatcttcaatcgtttatacaaacaggctctttatatagggcctgtttttttatgttctctgtatcatactgaataaaaaaaccctactcaacgttcgagtagggacagttgctacaaggtaagaaaaaggtttaaaacctcaaaggattgtttacagtataacataccggattgacgatatgtggaatatatataaatgatttgtttttatgttctcaagataactgtatgttattctttgttacaattcgcatatctcttttacgaaaagaagataaccaactgctattcactgtggaagcagatgtaagaaattcttaaagataaagaggggagtggttgttttttcttctggaaataatcacttagacctaaaacaatgaaagccctgcctctcttccatccttacggctccttgtccgtgccagtgtgaatcaggattacaaaaatcaagtgactatttcatcgagttttttgataaaacatcaaatgttcgttgaagaaatttttaataataaaaacagattagattgtaggaataataaaagaggttaatgttctaaaagtaagttgaagaagttaagcgtcttcgaaatattttaatcgtaatattccgaaaactcgtgggtgctttttggaatgcaaaacattatttaaaattaaccttagcagaaacttttcatttgtttttcagtgattcctttaatgacttccagttcactaatcaaaaattcatatgcatgatccaacatttttttttcgcttgaattaagtgctttttctttcttcattcgcattaaatcacgtacaacttcagcgccttcttgtatttcacccgtttttattttgttcgtgtttactatatacctttgcttccacggcagtaacttatctgattctccatgctgaaaaatgtgtataatgtgttttaatgcacgtatatcagtaactggccgtatatttgaactcaatattttacgcgttggaatcataactgtcatattactgattgacattcttatgacataatactgttgtttttcctctaagaattgtttttcttctatggcttcaattgtacctgctccgtgcattggataaacaatgttatcgccaatttgaaacatataatccacctccatatatgggaacttaacttaaggttatcatatatggagtgagatatcaaatttttaatgataacatggtcatttatttgtgtcaataattttttttaaaaaaacaacatcaaaacaagagggaacctgtgggattcccaaaaaaggaaagatcaattggtccgtgtatatcttggaatctcgactaattaacagagatcagtttttcgttgaaaatgagttattaaatctcctttaggagttcatgacttgacatcaatgacagcaattgaatcctaggtttgtttacttttttactttttcgatgtcttcttctcctcaaggataccaatcatacaattaagagcatgttaagtaaatatggagacttcttgtgattaatcttttgggtttaacgtaaaacaggtgggtactaatattaactctttataatcattctcatgccgtcttgaaaattgacagtatacctgtaagggtataatattgattcacaaacattatctagttaataatgtagtgtgataaagcatagtatgaagtgatagttgataacatgcaaatatataaatttcaaagaaggagttcaacgcatggaatatgatcaaaagattaaaaatcgcttacgccggatagaaggacagataaaaggtgtattgaccatgatggaacaaggaaaagattgcagagaggttgtgacccaactagctgcttcacgtaatgcgatcgatcgagcaatgggtttgattgtgagcacaaaccttgaacattgtgttcgtgaaagtttagaaaagggagaagacacacaacacttagtaaaagaagcggtcgacttattggtaaagagccgataaaaaaattcatcaacctatcatctttaaggttgacggatttttatatttattataatatacccctaccggtattttggattgaataataggagatctttcgaaaaaaattttaattctaatatacccataggggtaatagtggttagtcaggagaataaacatgacaaaacaaacaaaacgcacaacaattgttttatttagcggcgaatatgacaaagcaatggcagcctatattattgcaaatggtgcagctgcctacgatcatgaagtgacgatcttccatacgttttggggattaaacgctttacgtaaagaagagctgattccagtgaaaaaagaatttcttgaaaaaatgtttggaaagatgatgcctcgcggtgctgataagatgggtttatctaaaatgaactttgcaggtatgggccctaaaatgattaaaaatgtgatgaaaaagcataatgcacttacgttgcctcagttgattgagatggctcaagaacaaggtgtaaagctcgtagcttgtacgatgacaatggatcttcttggtttacaggaaaaagaactattagatgatatcgactatgctggtgtagctgcttatttggcagatgctgaagaaggcaatgtcaacttatttatctaatgttgttcattgcaagggaggctatgaatcacgatgggcagcggtgtaatcatcaataccttactcattttatttttactgtggatcgtatttcgacgttttttcccattgcatggtgttaaacaaataacaactgctgatttaaagtcagagctgaaaaataaagataaacagtttatcgatgtacgaacaccccatgagttccgtacaaggcatattaaagggttcaacaatattcccttatctgacttgcctcgtcaaactcatcagctttcgaaagacaaagacgtctttgtgatctgccaaagcggaatgagaagtgtaaaggcaagtaaaatattgaagaaacaagggtttaaacatatcacaaatataaaagggggtatgaatacatggcattaacaccgatttttatttatttgtatacccccgcccctatataagaaaaggaggaaaaaatcgtgaaagcaaatattgtattagacgctaaaggcttgtcatgcccaatgccaatcgtaaaaacaaagaagaaaataaaagaattaaaagctggtgacatattagaaattcaagcaacagataaaggatcggcggcagatctgcaagcatgggcaaaaagctcaggccatgaatatctaggtactgaaacagagggagaagtccttcgtcactttcttcgaaaaggaggagagcattcatcagaaaatgcatcttcaattcctgagatttcattagaagctttcacacagaaagtggatcgtgatgagtctcttcacattttagatgtacgagagatagaggagtatgaagaagcccatatccccggagcggtgcatatccctcttggcgaagtggaaaagcgctctaacgaattaaacaaaaatgatgaaatttatattatttgccattcaggaagaagaagtgaaatgacagctcacaccatgaaaaaacaaggttttaaaaaggttattaatgttattcccggtatgcgggattggacaggtaaaacagaaaaaggaggtatgtaaacatgaccgtgcaagcacttaccgcaaaagaagtcacacaaaaaatctttcacaaagaatctttatttattttggatgtacgtaatgaaaatgattttagcgattggaagattgaaggacattattttgaccatttaaatgtaccgtatttcgatcttttagatggcgtagaagatatcttggagaaaattccttctgataaagaagtgctggtcgtttgtgcaaaagaaggttcatctgtcatggtatccgaaatgctttctgaagcaggtcattctgtatcctatcttaagggcggaatgaaagcatggagcgaacatttagagccggtaaaagtcggggatttaaaagatggcggtgagatgtatcagtttgttcgtatcggtaaaggctgcctgtcatacatggtcatctccaatggtgaagcagcgattattgatgcgacacgtatggcagatatttttatagactttgcgaaagagaagggcgcggagattactcacgtatttgatacacatcttcacgcagaccatatttcaggcggcagagtcatagctgaaaaaacaaaagcaacctactggttaccaccgaaggatgcagaagaagcggtatttgattatcagccgctggaagaaggcaacgatattgtcattggaaacacaaagattggcattcaaccgatttattcaccggggcacacgattggttccacttctttcattgtcgatgatcagtatcttctttcaggtgatatcttgtttattgattcaattggcaggccagacttagccggtatggcagaagattgggcaggagatttaagaacaacgctttatagccgttacaacgcgttatcacaggatttaattgtattaccggcacactttatgatcattgacgagctaaatgagaatggaagtgttggtaaaaaactacgcacattatttagcgagaaccatggtttgaacattgcggatgaaacacaatttagacacttagtaacagatcatttgcctccgcagccaaatgcataccaagagattcgagaaacaaacatggggaaaatcagcccggatgaagaaaaacagcgtgaaatggagattggtccaaaccgctgtgcaatacggtaacacaagtttctattaaaaagaggagagacgaacatgaaatcagataaagtattagacgcaaaaggcctggcatgcccaatgccaatcgtcagaacaaagaaagcgatgaatgaactggaatcaggtcaaatattagaagtgcatgcaacagataagggagctaaaagtgatcttgcagcttggtctaaatcaggcgggcatgaccttttagagcaaactgatgaaggcgatgtattgaaattctggattaaaaaaggctaatgaatgtgaaagggtatcgaatacaaagatgccctttttctttgaaaggaggaaccaaaatggatattgcctttatcacaactcttttcattatagggtttattggtgcctttatttccggaatgataggtattggcggatcagttattaattatccaatgttattatacattccttctttagtgggagtgatgtcattaactgcccatgaagtttcagggataggggctattcaagttttctttgcgacacttggcggtgtttgggcttatcgtaaaagtggttttttaaataaagcattaattatgtacatgggaagcagcatccttttagggagtgtattggggagttacttttctcatcacatatctgaaaaaggaattaactttatatacggaattctggctatactagcagttattttaatgtttatacctaaaaaaggacaagaacatagcgaagacgaagaagtgatatttaataaatggttggcttcgtccctagcgtttatcattggtggcgtatcaggtattttaggagctggcggcgcttttatcctagtccccattatgttatcgattttaaatatccctgttagaatcacagtcgcttcatctcttgcgattacatttctttcatctattggcgcaacagttggaaaagtaatcacgggccaggttctttttgcaccggctctggttcttatgattgccagtttaattgcttctcctattggcgcatctgttgggcaaaaagtaaatacaaaattcctgcaatggattttagcgttattaataagtgcgacagctattaaaatttggttagagctcctttgatatgactcagcgggtaaaatgaaagattaaaagattcatcactccttggtttcttattcatgttataacacttgctcacgttcaataaatgtttcaagtgcttgatgaaattctttttgataatggtgacttgggcaagtcttgactatagtgcggtgaaaaacatttgatttagttgcgtccagtgttttatttaggacagcgttatgggacataaacctgtacgttttaaaacgaagatggtgattttaacaaacatggaacccgagacatgtcatgtaactttctggtgatgaaaaaaacgactccatttttactccacaatatgaataaatcttggtaaataacatgatcaatataaacaaacactaatatataaaggttttgtaatagaaaacacagtttcgctttattgagggcccagcgggtgaataacccatggaggttcaagtcctctcagccgcatcacaatgataccaagggttctgacacttttggtattttttgtttgaagctaccccgttacttatagcaagtcgtctggtttgccagctatcttttttaaagaccctttttcgattaatgaaatgataatctaggagaagacagccaaaaagaaatgagagcagattcagatgagaaacacaagaataactcatcgtgatcgtattcgtacacatttttacagaggaggacagttatgattggaatactggcaggaatggggccgaaatctactgggccatttgtagaaaaggtagtagacgagtgccaaaaaatatatggagcaatacatgacatggatttccctcatatgatgatttattcttgtccgactcctttctatatgaataaacctctcaatcatacggacatggaaaaggcaattattgagggggctgtaaagcttgaaaaaacgggtgttgattttattgcaatcccatgtaataccgcacatatctattttaatcaaataaaaaaatcgctttcagtccctttactaaacatgattgatgaaaccataaaaaaaatacctaaaggctccaaaaaagcagctcttttagccactgttcctacggttcaatctggaatatttcaagaagcgttaaacagagaaggttatgattttttacatcaagatagttggcaaatctatgtcgatcacataatagaaaagattaaacaaggtaaaatcaatgaggctcgtacattatatgatgaattacaccgtgaattagcagaaaaggttgatacggttatcattgcatgtacggatttaaatatggtcacggatcaaaaaagcagcgaacttacctttgttgattcatcagcctgtcttgctcaagccattgtaaataagtatgtattattaacaaaataagccgtcttatttatcagcaaattcagggcgctttttttccgttaaagcgcccggcttcggcaaatacatgatcctcgattacttctttgaatgtaacttccccgcgttattgttcttttaacattgaatactttcgatacgctttatagaaactgcagccaaatagaacagccataagggcgggaagcgacctcaaaagggcaaatggagtttcaaataaaaatgctttccaaaacattgcgccttccatactccacagaccttcagctaaatacaaacctgaattcgtgtaaagcatattacaataaaacaagcacagtaacccaaaacaagatgaaaaactcattagtcttttataataattactctttgattggcgatccgagaagatttcattttgatcatcatcttctttttgccaatatcgagttccaagcccccaagggccatttatataaacccagccgaagtcttcatagatctctttgtagtctttgaactttttctttgataaataatcttgataatccagtcgcatcacatattttttgtcggttttttcgaaagtgtatattcctaatccgctgatatttgtacagcgatagcctttttgtaattgctcgttcagccattgctcctctttttcaatatcaaaaaacatcttaaatgtcttcattcgattcacttccttcgtacagggataaaatatgcagtaacctgttttgttccattttcaaaatggcgcttccttccgcagttatcatataaacttttctccggcccgactctccgacaggttcaatccagccatgcttattcaagttttcaatcgcaccgtataatgtgccggctgctaaaataacagttccgttactcatcttttcgatcttctgcatggcggcatagccatgaagcggctcccgcagagctaataaaatataatgcatggtttcagacagcggtaataatttatgtttcatatcctcatcctctattcagtttgactatatagttaaacttaatacagttcaactgaatagtcaatggtcttttcaaaaatttgtcaaaggaacttgaaaatcaaatctaaaaagtcgcttttcttacgtaatgggaagcgactttttgtatgtccatattgacgccaaaaagaatttatcgcggtacgcagctgttttccgatgtagcagtgtcgtttattttcaatgtgttttttacggtaagaaaatcatcaaattgaaaggggatgaaaattaatagttgacttaagcaactgtttcgattacgatggaaaaaagttgcttaagtcaatcttttggaggaggttcatcaatttggaaacaaaacgtgttttggcattcagacaatttaatagattttatacagatattttaggctttctaaatgaacatatttatgacagtccattctctttaacagaaacaaggattttatacgaaatttataatacggccgattgtacagcaaaaatcattcaagaaaggttagacttggacagaggatatgtaagcagaatcgtcagaaaattcgaagaagaaggcttcatatacaagcaaaaatgcagagaagacggacgcaaccatttcctttatgtcaccgagtcaggggaaagtatttataaaagtctggagaaaaaagccaatcagcaggttgaatatatccttgaacgcatagacaaagaggaacaagaaaaacttgtacattcaatggaaaccattcaaaacattttgcagcattctttttatgataaagaatctccgatttcaataagagactattatacttcagaggatgtcaaaaacataattgagaaacagcgattattttatgccgaatcccatggctgggatgatacatttttatcctatcttcacgatacgtttaaagctgatattaaaaaaatatgggtggcagaaagcgggaatcaatttgcgggttgtatcggcttagtgaatgacgatgaaaaaacaggacagttaaggtggttcttagtcgatccgtcttttcaaagaaaaggtgtcggcagccgtctgattaaggcacttgttcaatattgtaaagaaaatggatacgagcgtatatttctttggacggtaagagacatgtcaacagcccggccattgtataaaaaaaacggattcgaaattacagaaattcatgaagaaaaacctttatggggatcaaatttaatagaagagcgctgggatttggaattataaagtgaggggggataggatgcgatgcgaataaaatatcactatgcatggatcattgtgtttgtcacttttttcacctttttagcggttcaaggcgcgcgtctttcatttggagcttttgttgaaccatgggaaaaagatttttctatgaatagaggaacaatctcgcttatttccactctgagttttatcatatatggcatatctcagcccataatagggaggctggttgataaattaggtccccgaatgattttgtcattcagcactttcgtagtcggggtcagctttgtattgacttcttttgtgaatcatccatggcaattatttatcctttacggaattgttatctcagtcggtgttggaggggcatccaatgtagccgcaacagtggttgttacaaattggtttaatgaaaaacgcggacttgcttttggaattatggaggcagggtttggcgcgggtcagatgcttcttgttcccggctctctcattttgattcaatggtttaactggaagttaactgtagtgattttgggtctgcttttaatggttattgtgtttcctgtcatactgttatttttacggaatcatcccgtcgagatggggctatctcctatgggcggttttatgaaagcagaagctgaaagtgaacagcatacggcccgcttttctgtttggacagtgttttgcaagaaacaattctggtttttaatattaccttttgcgatatgcggttttacaactacagggctgatggatactcaccttatccctttttctcatgaccatggattttcaacaagtgtaaccagtgccgcagttagtgtattggcgggatttaatatattggggataatcatctcaggaattgcggcagaccgttggagcagtaaaaagatgcttattcttttatatgtcatacgcgcattatcaatttgtatcctgttatatagtcatcatccggtcatattgcttatttttgccaccctgtttggactagttgattttgcaactgtagctcctactcaaatgttagccacgcaatattttaaacaatattcagttggttttattttaggctggttattcctgagtcatcagataggatcagcgctgggagcttatgtaccaggttttctctataatgaaatgggtaactatgatctttctttttatttctcaattattattttgttgggagcggcaatatttactttcttactgcctgaaacggtgaaaataaaaaaagaacaaaaaccgaagaccgattcagcttcaaatgaaacagtatccaagcgtgtgaataccccgtaaaggtccaaatcctctaagccgcattaataataccaagggttttgagtcccttggtattttttgttcattgaattattataaacttctaacttagttaatggttgttgttccagtttttctctataaatgtattcacaggctgtaagttggttttgttcgcaatttcaatgacagcgggaaccacggaagggtctgttttggagaagttaggaatccgcggatctaaccggaaaaagcgatctcccagcagattcgcgctgaccatggattcatagtagccatttccgccggagatcatctgaagaaatggcagtaatggttcattaggcgacctgtccaaaaggactccccaatttggaggaaggttcttcagattttcgggacgtatgttatccgcactcaccattccccatcccctcgtatctcttcttaaccgagtcggggcttcacctgtaccgatggatagtgccgcaatttgatccagtggcacgttggctttaccaaccgcaaacgcgatactggccgtactggggttcgttgccactacatatccgtccacgtagttttgataggctcgctgcgtcgcgggagcaccgctgctccgcagtatgacatcactcactttctcatttaaatagggagagccgggaaagttgtgaaataatacgggcgtccaacgatccagtgctggggagtataatttgaatgaagggacaacaattcgttttcttacatctttaagacgaaggcctggcgggaaaaagtttcgtaccgctttaataaaaccggaatatggtaattgttgattgaaaacaggtcctcccggccgcgaagtgctgaatgcgggcaggatttcatcctcaaaatactgaagtgtttccttcggagatcttccgcttgctaatgcaagggcagtaaatgaaccgattgaatttcccgcaaatacatgggttcggcttattaatgctggattttcttcagccagtctgttcaatagctgtaaacttaaagcacctaaggtaccgcccccgtcaaaggtcatgatccgatactttgccaaagctgatttctcctttctgatgaaaactatcattcagtatatgttcaaccagagtctattgtatggatgaatgaatatctcataccataaaaattgctcaatttatcaatctaacggggtgggaaagaaaatatttttaagtttaagaggcggatcatgaaggtattccatgggaagaaggagaataggttataaaaataaaagggggaaaaatatttgaatacgattgaccttatcgttttacattttgaagaggtgagacggcgaagcatcaagttatggacagctatacctgagggaaaaatggactggcgcccggattccgaagccatgtcgtgtaaagaaatgataagacacgtattagaagcggaatttctttatcatcaaattttaatgaaaaatatgagtgagttttcagaggaaactattaatccttatgaatcaaaaatgtttaccacagtaaccgaagaattagaatttgcaaaaccgtatcgggccgagtttttgacattcatcaaatcgttaaacgaaacggatttaacaaatataaagattgacaggtctgatgttggatatattcgcgaactaggagacatgttattaagaatcgcttatcatgagtccgtacatactggtcagcttttagattatctcagaactgctaaggttgacaggcctttaatttgggactagttaaatgatagagttttacaaggaaagcggaaagaatggaatataaaccgattaattttcaagagaaattagctgcgttccaagatcaatggtctccaaaagtaatcgctgaaatgaatgactatcaatttaaacttgttaaggtacaaggggattttgtttggcataagcatgacgaaacagatgaagtcttcattgtcattgagggtaatttaatcattgaatttcgtgatggagaagtaacattaaatgaaggtgaaatgtttgtcattccgaaaaatgttgaacataaaccttatgcagaatcagagtgtaacattttgcttgcagaacctaaaggtgttgtgaatacaggacaggaaataactgatcaaacagctgaaaatgatgtctgggtctagcctgtaacaaaaaaacgatcaaaactccgaaagaccgaatgacgattagagaaaatgatcaggaaaaccaattaagaatgatttaaggttaaatattgaaaaattttgttaatattataatacattgtttggaaatgtaatcattttataaggagttttctaattgcgttggagtaaatggttcaatattttttgcataacagcattggggtcaatatatggctataaattgtttactaaccaagaagtcagtacgactcgtttaatcatagctgctgcaattatcttgtggaacattgtcggactttttagcaaagaaccagtaaaacaaacacagcaagcaaactaaaagtcaaaaacacaaaaagttggtacagaaggatgctgcagcgcgcagcatcctttttatcattttcacaaaaaaaccaagggtttaaccccttggttttttcgcagtctccctttttacgctgcttatcataaacatttaagtttcatcaagcatccagaatctgttgtatcgataaatgaaaattatcctaaaatgtgccggttcatcaaaataccagtccaagctgcagttatttctttacatagtatgtaaagattaaaaaatgagagaaggagtggcgtaatgtattataacgaaggtgaagatcaacagtacgttcagaagaaaaagccatacaacgaagcctgtgacctaggccatgattttgatatggcggacgacgcagcaagagcggaagcagcaagagaagcagaagcgagagccagagcggaagaggcaatagcaagagcggaagaagcaagagccagagcagcagaagcggcaaaattagcagcagaagcaaaggtaaaagcggcaaaattagcagcaaaagcgaaatgtaaaaaacgtcataagaaagagaaaaaacaggattgcaaacgtaagcacaagaagaaaaaataagagcttttcatcatgtaaaagataagattcaatgtgtattgattttaaccgtacaggggtgcaaaaacgataaagaataagattctttgtcgggggatcaagcagaaagattgctcagccggtgtctcagcagaaccacgcatggcagggcaaacataattttctatggacttccatagtttggtcgggatataacgccaataaatgtaagtgcctatcatgataaaaaaggcaggagagacaagagtttcggcagcttgccgctcttgtcttttttttgtttttatatcatcttcgcgtatatgtgtctatttttaagtttgcagaacatctgtctaagaatttgtccaattcctacatatactggtatcggaatcaaatgcttattgggagtgaaatagatgggatcagcacagttaacgggacgcgtcatcttcaaaggggaccccggctatacagaggcggttaagaattggaacccttatgttgatgtctgtccgcttgtctttgtttttgcacaaaattcatacgatgtaagtaatgctattaaatgggctcgtgagaagaatgtgcctatgcgtgtcagaagcggccgccatgctctggataaaaatctttccacggtaagtgatgggattgttattgatgtgagtgacatgaataaagttttcttagatgaaaaaaacgcggtagcaaccgttcaaaccggcattcacgtcggcccgcttgtaaaaggtttagctcgggaaggttttatggccccgttcggagacagtccaaccgtcggaatcggaggaatcacaatgggaggcggatttggagtgctttcccgatcgatcggcctgataagcgataaccttctcgcactgaaaatggtagatgccaaaggcaggattattcaagcaaatcaatcccgcaatgaagatttactgtgggcttccagaggcggcgggggaggcaatttcggatataacacccaatatacattcaaagttcaccgtgcccctaaaaccgcaaccgtctttaatatcatttggccgtgggaacagttagaaacggtatttaaagcgtggcaaaaatgggcgccgtttacagacgaacgattaggatgctatcttgagatttacagcaaagtaaatggcttgtgccatgtggaaggattgttcctcggttcaaaaccagagctggttcaattattaaaacctttattaaatgccggaacgccggcacaaacagtaatcaaaacactatactacccggattgtatagatttcttagatcctgacgaaccgattcccggcagatctgatcagagtgttaaattctcctcggcgtgggcgctcaatctttggccggaagaacctattgcagtaatgagacaatttttggaaaaagcgactgggacagaaaccaatttcttttttatcaattggggcggcgcgataagcagagtaccaagcagtgaaacagccttctattggcgccgtccgttgttttatacggaatggacggccagttggaaaaataaatcacaagaagcttcgaatcttgcatcagttgaaagagtgcgtcagctgatgaaaccatatgtaacaggttcatatgtgaatgttccggatcaaaatatcgagaacttcggaaaagcatattatggctcaaactttgcaaggcttcaaagaataaaggcgaaatacgatcccgaaaatgtattccgttttccgcaaagcatcccgccatcgtataaatagtttgatcgtttttggaaacaaataaaaaacacaccagaacattcaggtgtgtttttattgttgctaaattgggttattcaattgcatcccagtgcggattccaaacgatttcccataagtgtccatcggggtcttgggagtgaccggagtatccgccccaaaaagtatcatgagcgggatcagttatcgttgctcctgcctgttttgcctgttccatgactttatcggcttcagctttactgccaacattatgtcctcatgtaaattctgcagggcttggcgcagttaacgtaacgtttgtttcatgtgcgatgtctttgcggttccaaatggcaagtttcagtcctgtttgtaagtcaaaaaaggcaactgcaccatgttcaaattctgtaccggctattccctctgtaggcagacccaagccatctcgatagaagtgaagcgatttttctaaattgtctgcgcctaaagtaattactgtaatccgcggcttcatagcaatcattgatcaagagcaatataaagtattggacattttcattgaaaagattttgacatttcagtaaagaacctatatattcatatatgagcacataatcatataatgttatttttttgtccatgttagaatgcttcataacagaaaagaaataataaatgcagtgtatgagataaggaggagatttttatgggtcacaatcacaatcacgctggcggatccaataagaaggttttattgatctcttttatcatgattacaggttatatgataatagaagcgataggcggatttttaaccaatagtttagcgcttttgtcagatgcaggccatatgctgagtgactcaatctcattaatggttgctctgattgcttttaaattggccgaaaaaaaggcaagtcatcataagacattcggctacaaacgatttgagattctcgcagctgtgataaacggtgttgcattaatattgatttccctttatatcatttatgaagcaatcaaacgtttctctcatccgccggaggtagcaacaaccggtatgctgacgattagtatcatcgggttagctgtaaatatattggtcgcttggattatgctgaacggcggagatacaaagaataacctgaacataagaggggcttacttacatgtgataagtgacatgctcggatctgtaggtgccatactggctgcgatccttatcatcttcttcgggtggagctgggcagatccagtggccagtgtcattgtggctattcttgttctgagaagcggttaccatgtgacgaaagactccattcacgtattaatggaaggaactccgggaaatatcgatgtcactgacatcattcatacaattgaagagacagaaggaattcaaagcattcatgatttgcacatatggtctatcacaagcggattgaatgctctttcctgccacgcagttggtaacgatcaactgaccatttctgaaagtgaaagtattttacgcaaaattgaacatgaacttggagataaaggcattacacatgtaaccattcaaatggaaacagcagcgcataatcacgacaatacgattctttgtcaggcccaaactgagaatccgcgtgaccatcatcatcattaaagaaggaaatagggactcactttgtctgctgacaattaagataaaaccggaggggggattcatatgtacgacacgatagtaatcggagccggtcaggcaggaatctcagtaggatattatctaaagaagtcgaaacaaaagtttatcattttggataaaagtcatgaagtgggagaaagctggaaaaaccggtatgactcattggttttatttacttctcgaatgtacagctctttgcctggaatgcagcttgaaggagacaagcatggactcccttcaaaaaatgaaattgctgcttatctgaaaaaatatgttgaaagatttgaaatcccgatccaattacggacagaagtaataagtgtccaaaaattaaacaactatttcttaataaaaacaaaccgggaagaatatcaaacgaagaatcttgtgatggccgcaggtccttttcatacccctaatattccatcaatatcaagggatgtagccgatcatattcatcaattacattcttcacaatataaacattcaaaacaactggcgcctgggaatgtactggtagtcggcggcgggaatagcggggctcagatagctgttgaattatccaaagaaagagttacatatttggcttgcagtaataaaccggtttatttccctttatggattggaaaaagaagcatcttttggtggtttgataaattaggagttttacatgcaagtcatacatcaatattaggcaagttcattcagaagaaaggcgaccccatatttgggtatgaattaaaacatgcaataagacagaagaagatcatcttaaaacaaagagtcatagccggaaagcaaaatgaaatgatttttaaagattcatcttcattagaagtaaacaatattatttgggcaactggttttaagaatccgctttgttggatgaaaatagaaggtgttttggataaggaaggccgaattatacatcaccggggtgtttcagctgtggaaggattgtattttattggtttgccttggcagcataggcgaggttcagcgctgcttcaaggtgtaggaaatgatgctgaatacattgtaaaacaaatgaacggcggatagacagaggagagcagtaacttacgtgtttactgctctttttttgtgttgaataagtccggttatgtgactgtgtaaagccgaaaaaatcttttggcttaattaataagaagatccctgactcattgattgtgcaacattctgacgtacttcccgagctaactgcgcggcacgtaaggaagcctgccaaatagccggactcactgcagattgactgatggataatgcctgttgtgtggctggaaccattggtcttaggagattttccgcctcgtctacagatgacgcgtattggtgaccggctgctcttctcaggtctgctatcgctgcggggaagtttgaccatagacgaagtattgaattcatgcagccaaccataagaggaaaatgaggagcccggccttgtccggcggcgagaagctctgctgcgcctaaagcggaataaacgtgatagctcaacggagtaagatatttcgcgtgtacagtatgaagttctcgtaatccccaagtgtctggaagaaatctgaattctgaactcataccgcatcccagagcgagtgctctgctgacagcctgcaagtgtttcactaccgcagccattgattgttgaaaggaggatgagtgtattggaatttgttgaatcgcagataaatggcttcgcattttatgatttgcctggcttaaatcaggctgctgtctgtaatcatatacataatacggataataataatacatatctaaactccctttatgaatgacttttaggagcaggatatgcacccagattgtttttgataagggcatgtgcctaaattatccatcagtgcaacgattttagtccgcgcatattcagttggtattttttatgcaaacggatttagtggccaaaacgtttctgctaacttaagtcttttaggctgaacaagggaatttcttagtacggcacactctcattaccaaaagcataggataatatcacaaaaatttaaaattgcggggatgaaaaatgtattatatacctttttcgcatcaatattattattgtgtgaatgtaccgatgtatagcgatggaagatctgtttattggacttttccaaataactatgatccttcatacgaagatagaaaccttctcttgaaagattatggaccaaaaccattcgttgtgaatatcaataaagccgcaaaacaaaacaatacattccgtacggccctatggacgggaaaacattttcaaattactttaatgagtatcggcattggagaagatatcggtttggaaatccacccccacgtagatcaattcttacggattgagcaaggccgggggatcgttaaaatgggtaagagcaaggaacatttaactttccaaagaaatgtctatgatgactttgccattgttgtccctgccggcacttggcacaatgttgtgaatacaggtaatacgccgttaaaactgtattcaatttatgctcctcctaaccatccgtttggtacagttcatgtgacaaaggccgatgcagcggctgcggaagattagtataggattccagaggactttactgctgcaaagactataggaaaaaatcgtatttggacagcatcattaaataaagcgattgaatggctgaaaaaatattaacgtttcagcttgtcatagtgcagttgatgcgatgctttattccacaacttttcaacagcaaatgtggttttttgtctgtacattttaattgattggcagtcagtgaaaataggcaatccgcagggaatttgtaataaatttatccttgctcctcctaataagcggctttaactgccaagtttctgtttctcttcaaaccatttgcgaagctgatgaatatgagcttgatgatatctattatggtctgccatatgccatattccccattgaatggttgcttgtttttctgcttcataatctactgtatgattcagctgatcgtcagttaactcataacaaacagacttaaacatgctgaatacttcttcataatcagtgagaatttgttctaatgaaacaccggaaatgaaagggagcttattgttcagatctaacattggtccatacttctcttcaagctgctttggtatcggttcaccctttattctgaatatccagttgagatcaacatatgctaagtgtcttattagctgagctgtactattgtatgtttgatttggtcctttataatcaatctcctgctgtgacatgtctgacacaatggatattaagcggctgtaattttcattaacggcagaatacagcatcacctcattagcacaatttttatattcagtttgtcttattactcatatttgtcaagccatccagggaatgaatcgctagaggatgaagcaatgaagcaggctctctttgcctgctttttttgtgtgtcggcctatacatctgacatgtttgtttatctgaaactgtacctttttaaatgtcagacagtgttatatgatactctgcagatattcaagaatatgtacttggaggacattctcatgcgaaattttaatgttgctatccctacgccttttcatgaagatgaaagtttatatttagaaggatttgatgctattgtcgaacatttgaaaaacagcggtatccattcgttactcatatgcggcacgactggtgaacagcattcactcagcatagatgagcgtcttcagatcattgagtatgttcatcagcgaaaatttgaagatgttgaactgatgttcggtgtttcagccgtaagaaccagtgatgccgtcaaactgatgaaacacatcgagaaaaccaatattgattctgtactgattggttttcctccttatataagaccgacacagcagcaagccgtttattacgttgacgaacttctcagtcatacctctaaagaggctgtgctttataataaccccggccggaccggttttaatctgagtgagaaagcgcttaaagacttaataagccggcatcccgggataagggggctgaaagaaggaggagacgttctgcgtcataaacaaacagagttccctgatcactttattttgtttgcggcaggagacgttgaatttccgaagatgatgagtaacgggtgtaacggcctgtcaagcatggccggaaatgtctatcctgaagaaatcagagaaagcttcagcagcttatcagaaaataaaccgattaatctggaccgaataaacgatctgattgctgaagtgacaaatcatcatactgtcatgaatataaaaaatcactataagaagattgggattcaagcaggcagctgccggtcacccattatataagaaatgttccgtcgcggataagtgaaaaatgtgatcagcgcgctttctgtacttggattaggcttaataagcaagttatataatactgtcattagcgggggcgtaagcatttgtttagctttacataagggaaaccttatgatatggtgattattgctaatattgacaagaaagaggtgaaagcgatgataacgatttatggaattttgtatggtaagaatgcaaaaattggaaacatcttggcggacaaagggagcagtctgtccttttttaagccaaatcaccatacaaaaacagttatcggtgctttttctctatgtcaaataaacgataatccaatgacataatgtccttgtttatttgtgcatgatgttatttaagcgtaacaccgataattgtgtcggtgtttatttgtgcctgattttaaaaaaaggttagatgatcactcccttctatttactcaaacaaacaagagtattatggaaggatgagaaaacatgcaacaaaaaaacaagtatataagaattcaagagttcctgaagcaaaataaatttcctgattttagaatgaatcaaatcaaaaatgctgtattccaagggagaataaatcatttcaatgaaataacggttcttcctaaatccttgagaaaattgttaatagaggagttcggagagtcaattttaaatattgctcctttaaaagtgcagcattctgagcaagttacaaaagtcttatttgaaatttctggagacgaaaaaatagagacggttaatatgaaatataaagccggttgggagtcattttgtatatcctcgcagtgcggctgtcatttcggctgtacattttgtgcaacaggagatattggtttaaaacgcaatttaacgtcagatgaaatgactgaccaaattttgtactttcacttaaaaggacattcaattgacagtatttcttttatgggaatgggagaagcattagcgaatgtacaagtttttgatgctttacatgtgcttacaaatccggagttgtttgctttaagccctcgcaggttatctatttcgaccataggtattattccgggcattaaaaaaatcactcaggattatccgcaggtcaacctgacgttttcattacattctccttttaatgaacagcgaagcaagttaatgccgattaatgaacgctacccgttattggaggtaatggacacattagatgagcatatacgtgtgacctcaagaaaagtttatattgcttatattatgctgccgggagttaatgattctattgatcatgcgaatgaagtagtaaatcttttaagaagcagatataagagagggaacttgttccatgtaaacatcattagatataacccgactgttagttcacctatgagatttgaagaagtaaatgagaaacaagttgtaaatttctataaaaaattaaagtcagcaggaattaacgtgaccgtcagaagtcaatttggcattgatatagatgctgcttgcggacaattatatggaaattatcaaaaaaataagaaccaataaatcaggtgcagaactcggtttgacttcatattatttcatttgataacataaaatggttatcgtgattgaaaaaaagtacccgtttttataaaaaaaggagtcataacgttgctgaaaaggttttttcttgtttttcttacgctgatgatgtctatatttgctgtattcgcggctgctgaagagtctcccggcgatcgtgtcatttcttttgacgagcctatgattttattgatctcactcggaatcatcttatgtttgttcattcctccattcgtcatgtccttttttggcagtttggttgtgagaatcatatccggagtctatcaatgttttatcgttctcacgtttgcggggctcattccgattggatttctgatccccaatggctttttgacaattcttgctgccgtactggggactttggtcagttcagcgagtgttgccgtgaccttattcgttggcaggacagagaacacaaataagctttcgtaagcggttttgacaacaataacacgcgtcctgaaaacaccaagtgtacagacccttggtgttttttaattccggcagaaaagaaggtataatgggcggagaagaggtgtcagccaatgaaaataaccagagagacattagaaaaacagcaaatttggatatatggtgtgactcttgtaatcggcggaatagcggggatcgccgggaaagattcaggacttcgctggggatggacgatatcaccgcttatcgctgttctcatgtatgccatgtttgcccaaatcccattcttgaagctgaaggaagccatgtcaaacctcaagtttatggcggctttattgatcggtaatttcttagctgtacctgtcgttgtatgggtgttaaccgccatttttcctcaatctcctcctatattattaggggtttgtttggtattgcttacaccttgtattgattacgtcatcgtctttactcagctcggcaaaggaaatgagagattaatactggcttccacgccggttttgttcgccgttcagatggtattgcttccgttatacttgtggctgtttatcgggaaagaagtgataggggctgttcatgcggggccgtttctggaagcattcttatgtttaatagcgggaccgctgctggcggcagtgatgacacaattgtgggctgataagaagccggcgggagaaaaggtgttggagtggacggcgtggctgcctgttccttttatggctctggtcttactggcggtcgtcgccacacaaatcggaaaggtcatcagtgatgctggcatcattatacgtgtgattccgatctatctgttattcctgctcattatgccgtttgtctcccggtttatcgcatatgcgttccgtctggatacaggtgaaggaagagcattgatcttcagcacgggcacaagaaattctctcgcagtccttccgttagcgctggctctgccggatgcttgggcctcattagccgccgctgttatcgtcacacagacgattgttgaattgataggcgaattggtttatataaaagcggtgcccggatggctgctgaaataaaaaataatttgaactgaaaaaaacataccaacaaatattggtatgtttttttatgtcgattataaagttgaaatatcaatgacgaaacggtagcggacatcgctttggagaacccgttcgtacgcttcgtcaacttgattggccggtatcacttcaattttaggagcaatgccgtgctcggcggcgaaatcaagcatctcctgagtctgcggaataccgccgacgagtgaacccgcaatgctgcggcggcccgtgattaaggagaacacactgtatgagtccggcttagcgggcgctcccacatttaccaatgtaccgtcaatgcgaagcagggataagtaggcatctacgtcaaggttcgcggatactgtatttaaaataagatcaaatcgtccggccagctcagtaaatgtatccggatcgcttgttgcaaagtaatgatcggctccaaattcaagcgcttcgtcttttttgttcattgagcggctgaggacggtgacctctgcgcctaaagcgtgcgcgaattgaacggctaaatgtccgagcccgcccattccgacaatcgccacttttttgccggggccggcattccagtgtttcagcggagaataggtggtaatgcccgcgcacaatagcgggctggcggcatctaattccaattgatcgggaatccggacaacgaatctgtcagtgacaactattttctggctgtagccgccgtacgtagggtttccgtcgtagtccaggttattataagtctgaacaacgccttttgtgcaatattgttcgtctccgttcagacagtattcacattccccgcaggagtctacaaaacagccgacacccacacggtcgccgacggcaaatgtggtgacttcttcacccacggcttccacaactccggcaatttcgtgtccgggaaccatcggaaagattccgccgccccattcatcgaatgcactgtggatgtctgagtgacaaatcccgctgtacttaatatcaatcaggatatcgtgcggccgtaatgctcttctctcaatcgttgtccgctcaaatttagcttttgcatgcggagcgcttaatacacgagtcggatgattattgcacatggttatcttcctttccaagataaagtgatgaatcctctgttcaattttactttaaatgttaaagcggactttaagtcaaggagtttggtttatttttttatgaaatgatattctataatggcacgcttatgaaaggtttgaaggacgggtgataagaatatgaagattgcgcaggctgcaaagcaggttgagttatcagccgcaacgcttaggtattatgaaagtataggactgattcctccggtaaaacgcgatgaaagcggcatccgcgattatgacgaagatgatgtgaattggattgaatttattaaatgcatgagaagtgccgggctgtcgattgaggcgctgattgaatataccgctttatttattgaaggagccgatcatacgatcgaaccccgaaaaaacatcctgataaatgaaaggaaaaggctgacggagaaacagagggaaattgatgaaaccataaaacgattaaacaggaagattgaggattatgaagatatccttgaaaatgaagcgaaacttaaaaacagattgaaggctgaatgtatttctgaatgaagagaaggtgtcccggacgccgggccgcatgaaatgtaccaagggaaacgagccttggtttttttattttctaaagagtggaaacaaaacagctttttctatcttatcaatcattacttatccttttttcagcttgacttttttactgcagacttttaaagtgtgaaatgttgcttagactgtgattagcgactttaatgctgaaaagaggtggtttacccagatgaacaataaaaagaacccttgggcgttagtgcctttagtcttattcgtagggctttttgtcggctctggtctggtgaccggagatttttataaattgccgatcttgattgccgcgatcattgcgtcagcttttgcgctgttatttaaccggaagaaatcgctcaatcaaaaaatagaatggttcgcttccggtgcgggacatcctgatattatcattatggttatgatttttatattggcaggtgcctttgcttcggcggctgaagcgatgggagcggtgcattcaactgtcaatcttgctttgagcgttattccgcagcagtttttgctgccggggctgtttatcattgcttgttttatttctatatcgatgggaacatcaatgggcacgattgcggcggttgcgccgatcagcgcgggtctgagcggagagcttggaatctccggcgcgattacgatggcggctgtggtcggcggagctatgttcggagataatctttcttttatttctgatacgaccatcgcgtcagtccggacgcaaaaaacacaaatgatggataaattcaaaacgaactttctgattgttttgcctgctgccattgtgactgttattatcttattttttattccggcaggccacgccggccatacgggtgctgaatcttacagctggattaaggtgcttccttatgtcgccgtgttggtttttgcgttaatcggtattaatgtgatggctgtcatattcggcggattggttttgacgggaatcatcggattagcgggcggcagcctgacgcttgactcttattttaaggcgattacggatggaattgccggaatgagcgatctgatcatcctgtccatgctgatcggcgggatggtcggcgtgatgaaacaaaacggcgggatcgactttttactggagttcatcacgaaacgaatccgttcgaaaaaaggcgccgaagccggcattgccggactggtcagcgtgacgaatctggctgcggccaataatacgatctcgattatcgcagccgggccgattgcaaagaatatcgctgataaattcaacatcgacaacagaaaatcggcaagtattctggatatcttttcgtgtatgatacaaggattgattccttacggcgcgcagctgttatcagccgggaaattcgggaatatttcacccgtcagcatcctgccatactctttctatcccgttttaatcggaatctgcggcatcgccgccatcatatttggactgccgaaattcacaagaaatacgaaataaaaaaaggcgccgttcggcgccttttttctttcatgacagccaagcatttctcaaaagctgtacgccatgtgtgatctgatccgtatcgagatgggcgaaacccagctttatgatcggcggttcgggtttttcggcaacgaaataaacggcggtaggatataccttcactccgtactgaaaagcgcgttcgattaatgtttcttctgtatagttcaggtgaactctcaccaatatatacaatcccgactgctcgccgatgatcgtcacatgaccgccgaactgctgctttacatgtgaaatcaagtgctgcatttttcgcctgtaaacaatgcgcatgcgcttaatatggcgggtccattcaccggccttcatcaattcagccatggtcagctggttaagcgaagaagcggtgctttcgaaatgaataaaccgttctttataccggtgcaaaaggcgctgcggcaaaaccatatagcttatgcggatgcccggaagaaaggattttgagaaattccctaaataaatcacccggtctgattgaatggaagcaagagcgggaaacggctgctgtgtataacggaattcactgtcataatcatcctcaagaatataaccctctctatgattcacccaattgatcagagtttggcgctgctgaatggacatgcttacgccgtaagggctgtgatgggatggggtcacatagattaatttttctttcattgcatgtaattgagaaaaatcagctccgttttcatagacaggcatcgtttccagaggtagcccgtgaaattgaaaagccgctctggcaccgtcaaatcccgggtcttcaacgatcattcccgaaaaatcctctttcagaatccggctgagatatatcagcatctgctgcgtgctgctgccgatgataatggaatccgcatctgttttcactccgcgggattccaagagataagcggcaatttgttcacgcaggtctctctcgccgaacggttcaccgtacaggaagcttttctctgatgtcaaaacttgattgtataattttctccatgttttcagaggaaaatgcttttgatcgacggctccggcgcgaaaatcaatcaggaccggctgagttgattcggttttttcagcgtaaacaacatcgttttctttttgaaatatagaaggttctacttcatttgcaaaataacctttgcgtgtttctccgcgaatgtatccctccgctaaaagaagatcataagccatcagcgttgtattacggcttacccgcagggaatctgccagctcccgaatcgaaggcagccgctcatctgcctgaatatttccctgctcaatcaatgttttaaattgctcgtaaatttgtttgtatttcggggtgtcgctttcgaaagcgaaaatcatatttttcatcagatgttctcctctgacatgtgtatttattcctaactgtacctttttaaatgtcaggtgatatcttattatagcggaaagcgctttatcaatccatgttcgagaggagagttttgtatgtatattccggctccatttcagctgagtgaagctgaagcgtgcgatgtcatcaaagagtatggtttcgcagcattgttttcaacggcgggaggcatgccgtatgcaacccacctgccattgatgatgagtaagaataacgaatgcttatacggtcattttgcattgccgaacccccaatggaaagagattgatggccaaaacgtgttagccgtttttcaagggccgcattgttatatctcgcctaaatggtatgagacgaatcaggctgttcccacatggaattatgtggcggttcatgtttacggagaggcggagcttttggatgaggaagaaaccgtgcagtcgatgagtgatctcgtattgaaatacgaaagccccgacagcccgtacaaattagaggatgtcgatgcgaaattgctggcaggcatgaacaaaggggtaaaaggctttaaaatcaatatcagcaaaatagaggggaaagcaaagctgagtcaaaatcattcagctgcaagacaagggctggtcgtacaacagctcaaacagattcctcatacaaacgaacagctcatttccggcttgatggaagaaaacatcaaacagatcactgcgaacaactgacaagcatgttaaaaacataccggcagcatgcggtatgttttttcaggttatgaagcttttctcaggatgaataacgactcaaacagcacataaatcaacggcgccattaaaatgaagaaagaatgaaaaatagcatacggtatgagtaagtaaacgataagtttcaatagaatggtagacggtttattgaatgtccagcggttcttcaagatatcagtcatacaagctaaaacaaggccgaccgtcaaatatccggctgctatgtaaagataaataaaaaggtaaaacgggtaagaagacaacggcggtgtgtcttcctgtgtcatttttaaactcatgtaaaagaccaataaaaagcaaacggacgaaatcagagccagcaaaaggtgtttatataaatacttcttcatgtgtttcacctgcctatggcgcaattatttcttaacatattatgacatggttttaccgctgctgaaagaatcggcagctgaaaaagacggcaaatcccgccgtctttttttatatcttaagatttcttaagaacttttaccgctttttcttcaggttttgaatgtaaaatttgatttataaattcgagacaaatggaaaaattaaattatacccgtaaatttaagggtggatggagagattaaagatgaaacgcctgttattcttatttcaatatatcatcaaaccaagaactgtcggcgccgttctgcccagctcacattttcttgctgagaaaatgaccggaaaaattgattttcataaagctgaatacattgttgaatacgggccgggcacgggagtatttacaaaaaagctgcttgaaaaacgtcagcctggggcgatgatcttattgatagaacaaaatgaggaattttatgctttactgaaagaaaaatataaagaggaacaaaacctatttattgtacatggatcggctgaacatattgagagtcatatgaaggagcatggaattccttatgccgactatgtcgtctccggacttccttttgcaagccttccaaaaaaagtgtctgctgatattttgacgaatacggctaaaatcttaaaagataacggagaattcattacgtttcaatatactcaatataagaaggcattgattgagcaattctttccgcaaatagtagtaaggagagaaatcaggaatataccgccggcttatgttttcagctgttcattgccgaaaaaaaagagggaggattcatatggggacaaccattctaatcgtagatgatgacaaagatatccgaaacctgatctctgtctatttagaaaatgaaggaatagacacacagaaggcgaaagatgctgctgaagcattaaaattattggagcaaaaggagtttgacctgatcattttagatattatgatgcccaatatggatgggattgaagcatgcatgaagatcagacaggaacgaaatctgcccatcatcatgctttccgccaaatcggaggatatggataaaattcaaggactggcttccggtgccgatgattatttaacgaaaccgtttaatccgttggaattgatcgccagagtgaaatcgcagctgagaaggtataaaaaatacaatacagatacaattagcacgaagaacgtcattgaaatcggtgatttgaccgtgaatacagatacaaggcaagtgtgggtgcgggggaaagaagtcaggctgactccgaaagagtttgatattctggagttgctttcgagaaacaaaggaattgtcatgagtgttgaaaaaatatatgaggcggtatggaaggaagacttttttaagtcggacaatacggtgatggtccacatcacaaagatcagagacaagatagaagaggattctaaacatccgatttatatcaaaacggtatggggaacaggatacaaaatatgaagaagtttggaaataagctgattgtcaggcttctgatcgcgatcgcaattagttatcttgttgcatttggtgtgttgattcttgttattttatctatctcatatctgtacaaaataaattatttaacagatgtgagccagggaaacgctaattttaggatactgattcaatttactgcagctattttgacctttattgcggtttttttgttattggtgcggaaaaaaatattatatttgaaacacattacggagagtgttcaccatattgccaatggaaatttaggcttgaccatcaggactgaaagcagggatgaattgacacagcttgcacaacatatcaattatatgtccgaagaattagagagtaaatttgaacatgaaagacaattagaacgagcgaaaagtgagctgatctcaagtgtatcccacgatttaaggaccccgttaacatcaattatcggatatttggatctgcttaaaaaagaacaatacaacagtaaagcccaatttcaggagtaccttgaaacgatttattcaaaatcgcaaaggctgaaatatttaatagatgaactgtttgaatatacacatttatcgagtccggacgttactttgaaccgcagcaaaacagacttgtctgccctattggaacaaatcaccggagagtacattcccatttttgaaaaggaacaattaactgtccgaaaatcaattacggaagaacatgttcccgtctgtattgatatagaaaagatggttcgcgtttatgataatctttttatgaatgcgctgaagtacagcatcaaaccatctgaattgttcataaacctagaaataaaagatgaaaaagcaattttgcaagtgtcaaacaaggccgaaaatctccctgctgacgatatcaatcaattgtttgaacggtttttcagaggggataaggctaggacgggtcatcaaggtaccgggctcggacttgccatttcaaagagaattgttgagcttcacagcggccgtattcatgcggattacagcggcggatggcttcgtttttctgttgaacacccgattgactagagcttgtgggacaaacgttccgtaagcttttttcttagaataacttaagaatacttaagaattttaccggctgtttcttcatttttttttcttatgatgtgatagaaagcgaggagagcggagaaattgaaaaataaaatgattttattatgtatatggtttttaggcgtttattgtttgaaggaactggacgtgctgtcatttgatatgaatgatgtaacggactttatatcagggcatgtgcaatacgcgatgctgctgtttttggctttgtgggtcgtcaggcttctcttttttattcccggcatgacgctgatgtttttgggcggaatctgctttgatccgatggtcagcattttattatcaatggccggcctgtttataagcgaaacgttggtttatcttttttcaaagaaattcgccagcgaaaaaacgactcaattgctggaagataaatatcctgacttgaaagtgttattggaggcgtataattataagtttttggcagtggggatgctttgtccggcagctcctacggatgtgatttgttttttatccgctgcagtcgggttaaagtattctgcctacatgttaactgtattgatttcaaatattcctatggtgctattgtccagctttgtcgttatcaatttcagtgaatcaatgacaggtattgtgttagtgatcgtttcgtttctattgattacgatcttaacggtgagaatgtggaaccgcatgaagcaaaattactcatgaaacaggggttttttgttccgaaggatgtaaagaagaatacatcaaaaaaagctgtcagcttggtcctgacggcttatttttagtgaatggcttatttctccgtggtgaaataaagcaatgcgatgaccggaaaagcgattccaatccataatgtgatactccacccgcctgaggcgtatgcccatcctccgattgatgatcctatagcaccgcccagaaagaagatggccataaataatccgtttaatcggctgcgaaattcaggtgccaacgaaaaaatggcacgctgactgagtacgagattggcagatacacccatatccaacaggatagctgcggccaccagaactgctattccgacgggggagctgctctgaatcatgagcgggagtaataaagaaacgatgacagcaccgagagcgattccggtggcaagccgggtcaggccgcgatcagccagacggccgcctatcggtgcagccgctgcacctgcaatgcccgctaatgcatacagcgcgattgccttttgagaaaaatgaaaagcaggaccggacaataataaaggtacagtcgtccagaacaagctgaaagctccaaatacaaacgcatgataaatggcacggcggcgtaagaccggagtcgtgcgcagcagcttccacattgaaccgagtaagacggtgtagcttgtgtttgctgttggttttctggcaggaagcacttttgataagacgattgccaggacaacacttaacgcggcggataaagcaaatatggcattccacccccatatatcagcgaccagactggatatcggacgggaaagcataataccgagcagcaggccgctcatcacattgccgacaacccggccgcgtgcggcgtccggtgcaaggtatgatgcgaacggaactagcacttgggctgcaattgatcccagtccgatgaaaaacgcagcggctaaaaacagtgttccatgcttcgcaaatgctgtcagtgtcaaagcggctgcgcttagaaggagcgatacaacgacaagttttttgttttcgataatgtctcccaaagggacgagaaacagtaagccggcaacgtatccgatttgagtcagtgtgacaatcaatcctgcgctgcttggagaaagcccgattgccgcactaatgaatcctgccaagggctgtgcataataaagattagcgacaatgataccgcatgccgttgcgagaagaagggttaaaccaggtgaaattccctgatctgctgtttgtttgttttctttagccatatgaatgaactcctttttaagtgttttttatgatgcttgataaatgatttgctgattcatctcctttacgcagaggcttttggagtctgcatttcatcaagacttccctcaagttattttataaactaaacgtttagttttattataaacaaataatatactaaacgttcagttttgtaaataggtttctgttttctttttttatacaggttaagtatactgaacgtatcgtttataattcgggaaggaatgattcatgtgcagagtaaacgaggacggccgcgcgatgaaggaacacataaggcgattctttctgcagcgtatgacctattgttggaaaatggctttgacgcggtgacagtcgataaaattgctgagcgtgccaaagtgagtaaggcaacgatttataaatggtggtcaaacaaggctgccgttatcatggacagctttctttcgaccgctacggacagactgcctgtgcccgatacaggatcaacagtgcaagatatattgacccacgccacgaatttagcaaggtttttgacgagccgggaaggaaccgttattaaggaattaatcggtgcggggcagctggatgcaaaattggcggaagaatatcgcacgcgatttttccagccccgccgcctccaagcgaaaggccttctggaaaagggaattcaaaaaggtgaattaagagagaatcttgatattgacgtaagcatcgatctcatttacggaccgattttctatcgtctgcttattacaggtgatgaggtgaatgattcctatgtgcatgatctggtgatgagtgcgtttaagggagttcagcctgcctgaaaaatagccgggtcatgtgaaagagatacagacttctgctgcctatgggcggaatataatgaaaaggccgaacaagttcattgttcggccttttctgattgatttgcgaactgccgggcggccgccacgcaagcgataacgccgacattcaccgccgcaagttcccatcctgctttttcatggagaatcatggcggccagtaacagtccgaagaaaggctgcagaagctgcagctgcccgatcgcggcgatgcctccctgggcgagtccgcgataccagaatacgaagccgatcagcatgctgaatattgagacatatgcaagactgagcagtgcgggcgcgccgatgtttgaccatgagtccggcatgaagcagaaagacaggatgaacataaggggaagcgataaaacgagtgcccaagagatcacctgccagttgccaagccgccgggagaggcgggcgccttcggcataaccgagaccgcacacgataatcgaagcgatcatgtacgtatcaccgagcggagaggattctcctccttgcagcagagcatatccggctacgaggatgctgccggcagccgagaaaatccaaaagaccggcctgggccgttcgcctcctcgcagtacgccgaagatcgccgtcgcaagcgggagaagcccgatgtagacaatggcatgagcggatgtgacatgctgaagcgctaaggccgtaagcagcgggaaaccgatcacgacgccgagcgctactgttattagtgaaatgatgtcgcttttggcagggcgtttctcctgaaaaatgaggagcagagcgcctgccaatataccggctatcgcggcgcggcatacggtgagaaataccgggtcaaagtccgctacagccaagcgggtcgccggaagcgagccgctgaaaatgagtacgccgataaatccgttaatccagccgtttgcggctttcttcattccaatcactccaatatatatttctaaacccattttcaaagtttataatgactataaactgaaattggccttatacaaatggccagtttttataaaaagaagaatgccagtttggagggagcaaaaatggatatcacgccatttttaaatagagatctggatattccgctttatcagcagctttatcggcattttaaggaaaatatgcatcagggccgtcttcctaaaggactgaagcttccttcaaaaaggcttttgtcaagtcagctttccgtcagtcagacgactgtagagcgggcctatgaacagcttgccgccgaaggttatattgtcagtaagccgagaagcggatggtttgccgattatgactcggacgccgtctatgtgaaaaagccgggcgcttcgcccgttcaaacaaaggcgaaggaagaccgtcaatggattgattttcactacggcactgtggatgccgctcattttccgttttcggcatggcgcaaaagcatggttgcaagcttagatcaatacgggcatgagctgtatcggcccggggatgatttgggcgagcttgaactgagaacgctaatttcggagtacttatatcagtcgcgcggggtgaattgccgtcctgaacaagtgatagtcggcgccgggaaccctgctcttttgcaaatgctgtgcaaaatatttgaagcaaatctatccatcggatatgaagatccgggttatccgagagcgagggagatttttaaagccaatcacatgaagatcattccgatacccgtcgatgatgaaggagtctgtatccggaagctgaatgaagagcggccgcgtcttgtatatgtcacgccttctcatcaatttacgttaggaacgattatgccggtaaacagaaggattcagctgctgaaatgggcggaggaacatcaatcgttcattatagaagatgattatgacggtgaattccgatacaccggccagccgatcccatcattgcaggggcttgatcagcatcaccgtgtcatttatatggggacgttttcccaatctctgcttccttcgctgcgcatcagctatatgattcttcctttgccgcttattgaaaaaggcagggaaatcgcttctttatataaacagaccgtctcctgccacagtcagctgacgctggctcaatttatcaaaagcggagagtggcagaaacatattaacagaatgagaaagctgtaccggaaaaaaagagcggtattattagaggccgtgcggcgcgagctgggacaatacgtcaggattcgcggggaaaattccgggctgcggattttacttgacgttcagctgcctttcagcgaaaaagagctgattgaaaaggcggaggaacaaggcgtcaaaatctatcccgtgtctcttacctatcaaaaacaggtccctgaaaaaacagtttccctcggtttcgcgggggtttctgaaaccgatatacaagaaggcataaaaaaactgagagccgcctgggcgctgtaaaaggcagctcacagtttgaaatactgaagcttgagtcaggggtgatgtctcagcagcaaaacgatttataggacgggcaggcggagcgccgtatcaatattttgcaaattgagccggacttgttcatttgtgttccacgggtgataccagcctttttccatcatatagcgtgagatttgctcatgcatgtcgatggcttcttctaagtgacgggtgaggatcgctttcacttcaggcgtttcggcttccgtcgccgccatcgcatagtttctgacaccgctttttgccgaattcaataaatccatagcgacaatttggtctgtcagtgcattcattcccgtcaagtattcaataatcggattcattcgttattcatctcctattcatgctttgcatcagataaaatcgaggcaaactcctgcaattgccttgttgatgtatccgcatcctgctgcatgatttctttcagctgcggatcggatacgagcgctttcatggttttggatttcgtcagacaaagtgacttaaaagaagccatctcctgaatttcgagtaattcatgtaaggcgcgggccatttctgtagcctccgttctttaaggtttgagtacaacttttatgcaatcatctgttttcgtgtcaaacatctcatagccgtgcttcgcttcactaagcggaatgacatggcttacaacatcgcccggatcaattttgccggttgacaccaattcaaacatatacggcatatagtggatgacgggagcttgtcctgaccggatattgacgtttcgctgcatgatatcgccaaggggaaacccgttgtatctgccgccgtacacgcccgtaatctggatcgttccgccttttcgcaccgcttgggatgcgatgaccaatgcgctcatcgccccgccctgaagttttaatccgctggcgaggaactcaaggtctgtcattttcccgtccatgccgacggcgtcaatgacaacgtcggcgccgcctttggtgatttccttcaggtagctgcccgtattttcgtggtcttcgaagttcacgatttccactttattcgtccgtttcgcatgctggagacggtagttgacatagtctacggctattacgcgtttcgctccctttaaccagcagaatttttgagcgaaaaggcccacgggcccgcagccgagaacgataactgtatcgccttcttttacgccggcattgtcaacgctccaaaagccggttgtcatcgcatcggaaataacactcagtttctcatccggttcttcgcatgtttcgggaactttaaaatgagtaaagttcgcaaatggaacgcgcaaatactccgcctggcctcccggatagccgccggcatttcctgaatagccgaaataagcgcctatatcgccgttctcatttgattgatcacattggctttccaggtgatttttacaataaacgcattctccgcaggcgatattaaaaggaataatgacgcggtcgccttttttgactttcgtcacgccgggaccggtttcttccacgatgcccatcggttcatgcccgatgatgtagtcttcctgcaagttcgggatgagtccgtggattaaatgtaaatctgatccgcaaattgccgtacttgtgacttttataatcatgtcatcgtggttttcaatcttcggatcaggcacgtctttcacaacgacgtttttcactccttgatacgttacggccttcatgctgtgatacctccagtgttagtgttcatcaggtgtgcggtcaaacatcccttttctgttcgtttcaacgggaaacagattcatatttccgaccatgagggtatttttcgcagagagctgatccagtttatactgttcgctcagatcatgcgggtgaaaccactttttgctgaccatcaagtctgttatctcctgatgcatcgtgattccctgcatgagctgtttgcgaagcaaagctcttacatcaggtgaagcggtttctgttaaagcaacggcggtatttctgacgccttctttggcgcgtatgagaaaatccattgcgaatgtcatatccgcaagttcagggacatgtaatgaattgatcggatctaaatggtcatgattcaatgatgcttaccttcctttcaattgatgatcgaagtcggccggttttgaggaacaggagcctgaaaagatgcccgttcataaaccgtctgcagatcagccaggtcttgtgaggcttgctgaacatctttctccattaacgttttcaggtcctgatcaaacacaagcccttgcatgagcttggatttcgctacacaaagcgtcttgaagttaatgatttcatgtaagtcaagcgactcgtgagccgctaattcacgcttatccataatcgtctgaaacctccctttgtagaaatacgtagttaatttcccctgagaaaagaggtctagtcttacaaattttgtttatcagataaagcggagagtcaaaaaagaggaagcacaatcgcttcctcttgttcacatggaacggctgttggtgtcatgaacatttttctgatgcgcgggcggttttgccgcgcgggagacgagaccgctgagcaaaatgccgatcagtacgatgatcagtgctttaacaaggccgaattcttcaccgagcagtccgagaacgggagggccgactaagaaggcgcagtagccgacgaaggagattgctccgacccgcttaactgctccttttgggtcatcgccggctgcggaaaggccgaccgggaagccgagggaggcgccgattccccaaagaaagacgccgattacggctgctgtgaggtttccgctgaaaatcacaagggaaagtccgatgacactgatggcggtgcagagacgaagaacgggcacgcgtccgtaccggtccaaaaatgccccgccaaagatgcgggcgatcagcatagcggtgaggaagacgccgtaaaccgccgtgccttgcgcgtgcgtcacgtgaaaaccatccgtcatggtgagcggaagccagtcattggccgacccttctgcgaaagccattccgagcacgatgagcccgatcagcagtgtgcgcggctctgtccagacgtttaccggcttttcgcttgaaacttcctgccaccttgagacggcatcttctttcccggtgtcctcgggcagaaaccggaagaaagtaaaaatcaggataaactcaattccggcaatgagcagcaggtgaacgagaacgggaaccttgaataaaatagcgagagaggcgagtcctgcgcctagcaatgtgccggcgctgaatgatgcgtgcaatgcgggcatcatggttttcccggcggcgcgttcaagggcggaaccatctacattaagggccacttccgcaagtccgtagccgagcccgaagatgatcagtccggcaaatacgatgcttttgaaagcggcaaaaacacctgcgctgatgacgaatatcccgataatgacaatcagaacgctgatcaaagcaacgaatctggtgcctttccgcgagatgatccggctggcgcttaacaggccgatcaatgagccgcatgcaagcccgaaaataatcaaccccatcattgacgtcgaggctttcagcgtttctctcacctcaggcgtgcgggaaatccaggatgaaaaagcaagtccgggcagcgaaaaaataataaaaagggcaagtttccatttttgaatgccctgtctactcatgaaatcagctccctctctgccaaatgaagcggaaaacgcagagattttaatgtgatggcaatcaatcctttttggtaatagggctggatgtcatcaataagaatcagctccggcatgtgttctttcgggacaaaagcggagcatgcttcataaacctgttccatatccaacccttttgataattctccgataaacgcaatggcctgcggattgatgattgaaatcatggcgcttgtcatcttaacagccagttccggaaaagaatccggtgaatagagcttttcaagctgctgcttgcgtgtcgattcaaatggaatataagaaatttctccggcgaattgtgtattgcctttgactaagcgcccgtctataacgaagcgcgctcccggaggattgtctttgacaaatgcggccatggcgatggttttcgggacggaatattgctgatcgcgataaaatccgtacaaagcgtaatgcatctcgttttctacattgaccttgacagaatatctggcttcaagtctttcctgcatcgggatatcacacagctcttcagtgtcacaaatgccgatgacgccgtggctgaccacaccctgaacccctatgccgatcgcctttatattgggaaaccgccttatccattcgtcagtaagccgttcgatgaggtcataattgatgacatcataaaagcggctgtctttttcaacatagtcaccgtgccaatctgccagcgcgacgtcaatcgaatggacgccgccttctgttttaacggatatgccgagtaccaaatgactgtccgcatttaacgtaaactgccttgcttttcttccgcctgttgaggcgctcggttccatttccatgacttcgccgcgttcttttaattcatgtaaaatgtttccgcacgtggcggcgctgagccctgtttgttgagagagaaaggaaatggtggccgcatccgttttcagcagcgcttcaatgatggtctcttcattcgttttttttacaatggatgtattattaatggtattcgccatgattccgcactcctttattaatcactttttaaaagacttattaaaagtagcttaaaatatactttccgaatcagtcaagacggtttaaaattgttttcaaacggagaataaatagaatatccttgctgagaatggaggctcgacacatgagttctgataacaaaatctattatgaacgcggaacggaagagctgaggaagaaaaacatccgggcgcataggcttgtccgggaattaaacgacgccgattcggaagcgtttgaaacaaaagaagcgatcatcagagaactgttcgggacggcgggagagaaaccgagcattgagcataactttcattgtgatatcggaaccaatattcatgtcggcgatcatttttatgccggctataattgcaccattttagacatggctgacgtgcggataggcgataactgtatgatagggccgaatgtcgggatctatacagccgggcattctctgcagccggaaggaagaaataaaagcggttacggcattccgattacgatcggcagcaatgtatggatcggaggaagctgtgtcattttagcaggcgtcaccatcggcgaaaactccgtcattgcggccggtacagtcgttacgaaagacgtcccgccaaattccgtcatggccggaaacccgggaaaggttataaaaaagatatgaacaaaaaagcagcttgcgaacaatcccgcaggctgttttttctttcacccgtcatgcaggaaagaaggggaaggtgagaagcaggcacttatggtatgatgacaaatagaataaaacctcgtgaggccggtcggctaaaaggaagtggacagagattgtttggtacaaaacatcaagaagactatgtctcccgtgacagacgttcattgcatatgcttgcgcttcgggtgcccggtctggcgtttattttaatggtatatgccgcatcagtctctttgcagtacatttatgaaagctggacggtttttttgctgctgttattcacaatattgatcgtcatttttaccgtgctgcactggcattcccatcgctgggtgaagaaaaaaacgtttctttatttcatcatacagggatttatcatatatacatcggctaacttgatgactggcggctatattgcggttgtcgtcggtctctatgcctttttaatcgggcagattatcggaatggcggataagggaaaaacgctgctcatactctatctgttcattttaatgtctataacagctttgcaccaggagcatccgcatcatctgctacgtttcatcgttatcgccgctcccatcatgatcgtgattatcacgtatgcggccacatttttcgcacaagttgatgaaaaaataaaaacacagatgacgcttgaaaaattagagctcgctcaccggcaagtgaaacagctgacgctccagaacgaaaggcagcggatggcgagagacttgcacgatacgcttgctcaaggattggtcagcttgcatatgcagcttgaagcggtgcatgttcatctttcaaagggtaacactgacagagcgaaagacatcatcagccagtcaatggacagagtgaaaggcacattggctgatgcgcgctcggccattgacaaccttcgcagcacatcagaaaagatcgggttcttaaaagaaagcatcactgaacaaatcaaccattttacagaagcctccgggctgtcttgttttttagattacagcgtgcatcatgtgcttgacgttcatacggcggagaattgccattacatgatcggagaaggcctgacaaacgccgccaagcatgcagaagcaaagaatgtctgggtatccgttcaggaagaagagggacagatccgcataaccgtcaaagatgacgggaaaggctttgatgccggaacagaaatgagaaaaagcggacattacgggctgcttggaatacaagaacgcgtcaatatgatgaacggcactttccgtataacaagcgccagatcagcgggaactcaaattgagatcatcataccaattcaaggagaggcggaacatgtataaagtgttaatagcagatgaccatcttgtcgtcagagaaggtctgaagcttttgatagaaacaaatgaccattacaccataacgggagaggcggaaaacgggaaaaccgccgtccgcctcgcagaggaactaaagccagatgtcattctcatggatctgtacatgccggaaatgagcgggctggaagccattaaacagataaaagagcattctgatgtgccgatcattattttgacgacctataatgaagatcatctgatgatagaaggcattgaatcaggcgcgaacggttatctgctgaaagacacaagctcagaaaccttatttcatacgatggatgcggcggtcaggggagaagtgcttctgcagccgaacatcttgcggcgtttccgggaaatgaaaatggaacgggcaaatgccaatgaaacacagctgacggacaaggaaatcatagttctagaagccgttgcgcaaggacataaaagcaaagcgatcgccttcgatttaggaatctcagagcggacggtaaaagcgagattaacatcgatttataacaaattaggcgctgattcgcggacggaagccgtcaccattgccatgcaaaaaggcattctgaaactgaatatataatgaaaaactgcccaaacgtacatgcccctatgtacgttttttttatgtgaatgtgaactacaattaggcagaaagtaatgattggagaggagtattcgatgtctggttttttatataaattagggggatggtctgcccgcaatcgattaaaaatgatcagtgcgtggctcgtgatactgatcgcttcggttgtgatcgccatctcgttaaaacctgctttttctgaggatatgtcaattcccgacacaccttctgaaaaggcgatggatatcattcaaaaagaattttcaaagggtcccgataaaggaagcatacgggttattttcggagctgaagaagggaagaaattgacgtcaaaaccggaaaaacaagcggttgaagagacattaaagaagatcaaaaccgatcattcagtcgcttcaattgcaagtccttttgagacaggaaccatttctaaagacggatcagtggcatatgccgatattacgtacaaaaaagcggcggatgacattacggatgcgtctgtttcacatatgaaacacagtctgtccgccgccggagacaagggtctgcagacggagatcagcggcgatgtgccgggggccggtgttgaaatcggcggtgtatctgaaattgtcggcgttgtgctggcattcgtcgtactggctattacgtttggttcattagtcatcgcggggctgccgattgtcacggccttgattgggttaggtgtaagcgtcgcgctgacgttaattgggacacagttctttacgatagcttcggtcagtctctcattatccggaatgatcggcctggccgtcgggattgattatgcgctgttcatctttacgaagcatcgtcagtttttgggcgaaggtgtacaaaaaaatgaatcgatcgcgaaagccgcgggaacggcaggcagcgccgtcgtttttgcgggactgaccgtgatcgtcgcgctttgcggattgaccgttgtcggcattccgttcatgtctgccatgggattgactgcggcactcagtgtgctgatggctgtattggcatcagtaacgctggtgcctgcggtgttgtcaatcgcgggaaaacggatgattccgaaatcaaacaagaagaaagaaaagaaaagcgccggcacgaatgcctgggggcgcttcgttacaaagaaacctattctgttaagcattttcagcattattcttttatctgtcatcagtctgccggccatgcatttagagctggggctgcctgatgcgggaatgaaagcgaaagacagcccggatcgccgcgcctatgatctgttgtctaaaggattcggagaaggctttaacggcaagctgacaattgttgccgatgcaaaaggggtcaaggggaacaaaagtgaagcatttcaagacgccgtgaaagaagtgaaggacttgcacaatgtggcgagcgtcacacctgccatgccgaatcaaaaaggggactatgccatcattacggcagtgcctgaaaccgggccgaatgataaggcaacgaaagagttagtgcaggatatacggaaacgatcagacaaaaacggcatccgcctgctcgtcaccgggtcaaccgcggtgaacattgatatttcagaccggttaaacgatgccattccggaattcgccattctcattgtcgggtttgcgtttgtattgctgaccgttgttttccgctcgcttctcgtgccgcttgccgctgtcgtcggctttttgctgacgatgaccgctacactcggcttatcggtattcatattgcaggatggaaatttcaccggcttgctcagcattccggaaaaaggcccgattctcgccttcctgcctattttggcgatcggtattcttttcgggctggcgatggattatcaagtattccttgtcagcagaatgagagaagaatatgtcaaaacaaaaaatccggtacaagccattcatgccggattgaaacatagcggacctgtcgtaacagcggcgggactgatcatgattttcgtctttgcgggattcatctttgcgggagaagctacgatcaaatccatgggcttggcaatgaccttcggtgtactttttgatgcgttcattgtaagaatgaccattattccgagtgtcatgaagctgatgggacatgcggcctggtacttgccgaagtggctggataaaatcattccgaacgtggatatcgaaggccataagctgacacaaggcaaaacaccggagaaaccggaagaataaaatgaaaaagcagatcgttatgatctgctttttttatgtgctgaccgcatccatgaaaagagaaaaaagctttttcatgtcttcatgtttttttgtcagcatttcgggatgccattgcacgccgacgacaaataattcacccgtccgttcaattgcttcaatggccccgtctttcgcataagccgaggctttaaacgaaggcgccgtctcttttatgatctggtgatggaatgaattcacccgcgctgaatcgccaaacaaggtatggagacgtgtccctttttcaaaagaaacatgatgggtttttaacggcggatctttttcttgatcatgcttaatgtcagcaaacgaagcgtgtgtcaggtcttgatataaagttcccccgtaagtgacgtttaacatatgcatcccccggcagattgcaagaatcggcttttctaaagcaaccgccgtgagaatcagctccttctcgtaggcgtcccgatcaggaaaggtctttcttaaagcctgtaaaggttcttcaccgtaaaacagcgggtctatatcctggccgccggacagaatgatcccgtcaacatgagagacctgttcctttaaaagcgccgtctcttgaattaccggcaatataaacggcacaccgccggcctcagaaacagactgaatataatcattattgacatatgcccgattataacccgggaaagggccggattgatcagccataatgtttcccgtaattccaatgcgtttggccattcttcgcccccctgaaccatgctcataattaatctgaacgtaggttgtacaaatcagtttgaaattattcttcatgatacgtgagctttccaaaacaaaacccgtgacaatcacgggtttttcattcatttcaatttcttgatctcttccgtcagctctttgaatttttgatcaagctcacgatattgtttatcagccggagtcatgaagctgagttttccgaggacttcctgccgttcggtctcaagcttcaatcgcagttcttcagcatcgtccctgacggagggagattctttccattgttttcggacgctgccgtttgagatatcaagccggatgtccgtcgtcttttcgacaaagtaacgatcatgtgaaacgatgatgagcgttccgtcgtatcgggccaaagtgtcttcaagctgctcgcgtgacggcagatcaaggtggtttgtcggctcatccagaatcagcacatctttctcctccagaataaacgccatcagtttgcatttgacccgctctcccatgctcatcttgccgatgggttccgtccattgcgctgcggtaaatcctaaatgcttcatgagagattgaacatttcctctttcctcgaacgtttctttgtaaaaaagctgttcgggggttttatcaagcgggaggtcgaatacttcctgcgttaaatatccgacgtttgcagacggagaaatccatatgctgccctgcgctttttcctgcccgaggatgaccttcaataatgttgttttcccgctgccgttcgggcctgtaatcgcgatcttttcaccgtgcatcacagtgaaattcacgtttttaaaaagcgttcgtccgtcatatgactttgcggcatcccttacttctaaaaaacgctttcccgcttttttgcggtgttcaatggaaaaacggacttcatactccgcttcaaccggttctgctttcgctttttcaagctctttttcaaggcgcttctgctttgatttaatctgggcgtccgtgcgttttgcttttacgcgatggtattctttaaatccttctattttcgttgattgggcgtgggctttttttgaccaggcgctcagctcgttcatttgagcttcaatccgtctgatcatatgctgctgattctcatattcccgctgctgtgtcagccttctctgtttgcggacctccatatagcttgaataattccctttatgctcaatgagtttctttccttcgatggcccagatttttgtcgccgctgcatctataaaagcacgatcatgcgaaacaaaaataatggtgcctttgtaattcttgatctgatttagcagtatttctaaactgtgctgatcgaggtggttcgtcggctcatctaataacaaaaggctgcttgaggaggagaaacctttagcaagacgggctttcagtttttctccgccgctcaattgtgaaaaggcgcgtgcgggcacgttccacttttctaacaaggctgcctccgcaggttccggatggccggaatcataagcttccgtttcttgttcaaccatatatacgttcacatcttgcaccatctggatctgtccttgtgacggcgctttttgattgcagatcaattgcagcaataaagatttgccggcgccgtttttaccgataacgccgatgatgtcaccttgctgaacgctcgcgctaatctgttcaaaaaggggaacgctgttgatttcataactgatgccgcttaactttaacatttctttcatatgtcaatccctcgcttttaagggaggaccaaaaaaatcctcccaattgatttggaaggattagccgtacctgtgcatgatcaaataagctatttttacatagctttcgtatcgtatagaaaatgggcagactaatcctattttttctgatttgaaatatttgatttcaaacggtcaaaataagattagttaatcattgtccacccatcatcccttcgtatttgttacaaacagtgtagcacacacttatctgtaaaagcaaagggtataagcctttttattccagattggagacttcccactcttcttctaaaacggcataataatattcgtcccaccattcattatcttgggggatgcattttttaaaaaatccttcccgtctcattccgatcttttccatcacccggtgcgaagccatgttttccggctgacatgtcgcaatgatccggtgtaatttcatcttgttaaacccgaatgccagcacggcgcgcgccgcctctgaagcatatcctttgccctggtattccgggtgaaacacccagccgatttcatacgtatgatcgccaaaatactgaaaaaaagcaatgtggccaatgaccgttttttcatccttcaataaaacgggaaacttcccggcatgttcaccgctgttttcagtaacgaatttcctggcatcatcttcggtaaagacaccctctggtatatatttcatgacattcggatttgaggcgtacgcatagacatcctgccaatcttccggttcaaatgtccgaattacgagcctgtcagttttgatattcattttttatgttcctccatcaaaaaaggtttcatttactacttcgattgaaagatgtaaaaacctttgagcggggaagagccgaataaaaaaagcctgcagctatacactgcaggcggttatttttcatttgcggcggcgggcaggtttgtagacccgaattgccctccgacagcttcttttacttcatgaataacgataaatgatttcggatcaattttttgaacatgttttttgattttcagcaattcgttctttttaatgacaacatagataatgcgcttgtctttgctgccgtaatacccgtatccgtaaaaaatcgtcgccgcattgccgtactcggaggtgatggctttggcgatttcttcgtattggtcagacataatggtgagggcttttttattatggaaaccctcaatgacaatatcgacgattttggcgcacagatatacgaatataaacgtatacagcatatgattgatgccgatcgctaaaacggatgcgaaaatgatgacacaatccatataaaacatgcttttggagatgttaaagccctttgtgtaatttaataaatacgccaaaagcgtggtcccgccggtagatccgtcagcaataaagatcaatgccagccccgctcccatcagcagagcgccgaatacaatcccgagcaccatatcgtgcacgccgaacggaataaagctgacgatgctgagaaaaacagaagtcattcccgtaccgagtatcgtgtataaaatcgtttttttcgttaaaaatttataagccagcccgataaaaatcaaatttacaaccagagtcgtaatacttgcaggtatatggaaaagataatataacacgagagcgattcccacggtgctgccgtcccctaaatgattcgggatgacgaaaaattccacggacgccgcaataagaaaggctccggccataatcatcagtatatccttgcaaatgttcttcatgtgcaaacctcctccgcagtcaaaaatatataaaaaacaaaaacgcctcaaaaattatccagcagaactaaataatttttaagacgaatcattcacaatctcgtttgttcattcagtaaagaatgatcagcttcaatatcgaagattatatagacaccttcacatcttgtcaatgccgtgaaaattgatttttctgcagtgtatatgaggtttaaatcaatttaaaacgaggaattatatcagaagagttttcatttctgctctatcaataagagaaatgtaatgagagacaacgaagaagggatgatgacattggaacgaatttttatcagtccggccaaatacgtgcagggaaaaaacgccattgaaacgatcggcggacatctggagggcgttggtgaaaaagccgtcgtcatcgcggacaaaaccgtatgggatatcgcgggccacaaggtgacggctgaattaaagaaaagcaatatctcttctgaagaggcggttttcaacggcgaagcctcccaggaagaaatgaaaagaattgccggcatcgcagaaaaagcaggcgcgactattgtcatcggagtcggcggcggtaaaacgcttgatacggccaaagccgtatcagatgaaataaacggctataccgttatcgtgccgacggccgcttcaacggatgctccgacaagcgggctgtctgtcgtgtattctgaacaaggcgcgttcgaaaactatcgtttctatcataagaatcctgacctggttctggtcgatacgaaaatcgtcgcggaagctccgccgcgctttttagcatcagggattgccgatgcgatggcgacgtggatagaggcgcgcagtgtcatcgccaatggcggtaaaacgatggcaggcggaattccgacaatcgccggagaggctatcgcggaaaaatgtgaagcggtattattcaaatacggccgtctcgcttatgagtctgtgaaagcgaaagccgttacgcccgcattggaagcggtggttgaagccaatacacttctgagcggactgggatttgaaagcggcggcttagctgcggcgcatgccattcataacggatttaccgcgcttgaaggtgaaatccatcacttgacccacggtgaaaaagtggcattcggcacgctcgttcaattggcgctggaaaaacgttcgcttgaggaaattgagcggtatatcgcgttttatatcagcttggggctgcctgtcacacttgaagacatcaaattgaaagacgcatctaaagaggacattatgaaagtggcagaagccgcgacgattgaagaagaaacaattcatgccgcttttgacgtgacggctgacgacgtggcggatgccattatagcggctgatcaatacgcaaaagcatttaaagaaaaacacgcgtaaaaccttttaccgcgtgacccggacccaagggctgttacagcccttggtttttttatgccctttgaaaacttttaaaaataaagaaaaaattatgatacaatatacaaatgttttgagagattgacaaaggaaaggtgggaacgatatgcttcataatccgaccggtaaggagcggcttgcgctggcttttcttctcggaatgcttgcgatactggggccgctcaatatagatatgtatctgccgagtttccctgaaatcgctgaagatttaagcgcccgcgcatcgcttgtccagctcagtttaaccgcatgtctgatcggattgacaatcggacaggttgttgtcggcccgttaagtgacgcgaagggaagaagaaaaccgttattactatgtatttttttatttgcgttgttttctctgttttgcgcacttgcaccgaacattactacattagtgattgcccgttttcttcaaggattcaccgcttcggcaggactcgttttatcccgtgcaatcgtcagagatgtgttttcgggaagagagctttctaaatttttctcgctgctgatggtcattaccgccgtcgcgccgatggtggcgccgatgacgggaggcgcgattttactgcttccgtttgcatcatggcatacgatttttctctttttaacctttatcgggtttttgcttgttctcatcattgcgttcaagctgacagaaaccctgccgccggaaaagcggattccgagctccatcggaaattccgtgcggacaatgggaagcctgctgaaggatcggtcatttatcggctatgcgctgacggtcggttttattcacggcgggagctttgcgtatgtctccggaacgcctttcgtgtatcaggatatttacggagtatcgcctcaggtattcagtgttttattcggcataaacggtctggcgatcattaccggaagctttatcatcgggcgtttcggcggaatcattcacgaaaaaagcctgttgagaatcggcgtgattacagcgatgacggcgactgccgttctgctcgtcatgacgatcattcacggaccgctggcggcgctggtgatttcaattttcatttatatgattacgatcggcatgacgctgacaagcacctttacattggcgatggaaaagcagggacaccgcgcgggaagcgcaagcgcactgctcggcatgcttccgcttcttctcggttccatcgtgtcgccgcttgtggggatgaatgaagcgacggccgtcccgatgggggcaattatgttcacgacatccgttatcggttccatcgcttttttcgccttaacaacaaaaacggagaaagcaaaaaaggagtgaaatgattcactcctttttttgatgcccgttattcatatttcttcagcacgattgccgaattatgcccgccaaagccgaatgagttggaaaggccgatcgttaacgattgctggcggggcccgtctgctacatagtccaaatcacatgccgaatcagggtgctgcagattgatcgtcggcgggatgatgccgtgtctcaggctttctgtcagagcgatggcttcaacgccgcctgccgcgccaagcatgtggccgagcattgatttgtttgccgtaaccggaatatcatacgcaagctccccgaataatgtcttgatggccaacgtttcagaaagatctccggcttttgtgcttgtcgcatgagcgcttacgacatcaatgtcttccgctgaaacattcgcctttttcaaagcgtttttcatcgccaggtatgcgcccgttccttccggatgggaggccaccatatgataggcgtcagagctcgcaccgtagccgagcacctcacaaaggatcggggcatttctgccgattgcgctatccaatgattccaatactaagatgcccgcgccttcactcatgacaaatccatcgcgatccgcgtcaaacggccggcttgccgcggcggggtcttcgtttctcgctgacagcgcgtgggcattgccgaagctggctaatgacaaattcgtaatcgccgcttccgctcccccggcaaacatgatatctgcgtcatcattccgaatggcgttgaatgcttccccgatcgacgtattgccgatggaacacgcggtgacgggagaaagtgaggggccgagcgcgcctaatctgatgctgatttgagcggcggccgcatttgagatcatcatggggacaaggctcgggctcacttttcgcgctccccgttcatttaaagtatgaacattatcaatcaaagtcgtgatgccgccgattcccgagccgacgtacacgccgaggcgttcacggtcaatctgatcgagctgaatcccggagctttcaagcgcctgttccgctgccgctagagcaaactggctgaaacggtcaagccgtctcgcttcttttctgccccatctttcttctgcgtcaaaatcacggacggtaccggctatttttgtctttgagccggagacatcaaatgaatcgatgaaagagattcccgattttccttccgtcaggtgtttccaaaatgtatgcacatcattgccgagaggtgaaatcactcccattccggtgatcacaactcttttcatggtcattcctccttcggtatgtatttattgtaactcgcaattatcctattacaagttgttgattatcctagtataatgaataccagggtaagagaggagagattcggtatgataccagaaggaagattgcaggcgctctcagagtttttaaaaacgcagcgggccaaaatttctccgcagatggccgggctgccgatgggcacacggagaagaacgcccggactccgaagagaagaggtcgcgcaattagccggcgtaagcaccacgtggtatacgtggctggagcagggcagagacattaaagtgtccgcagccgtattggacgccgtttccgatgcgctgcagctgaacaaagatgagagaaattatttatacgcgcttgctattgaggagggcgtgaagcagccgtttaccgcggaggaagaagcggttatcagcccgtcgctttcaaaaatcctgcaggagcttcgttattgtcccaccattatctcggacaggcggtgtcatatcgtgggatggaaccaggctgcggcgcacgtgtttttagattttgaacaaattcctcctgaaaagcggaatctcatagagctattgttttccagaaaagaattaagaagtttagccgtgaactgggagcactttgtgaaaggattcatcgccattttcagaacgtattacggccagtatgtagcggatacgtggtattctcagtttatagaagaaatggagaaaacgtattcggaatttcatacgctgtggaatgagagcgaagtcagctcggcacccgaagtattaattgagttccgccacgcgaaggcgggaaaaatggtctttaacctgacttcatttcaggttcagggcaacagtgatctgcgctgcagtgtgtatacgccggtagatcataccgaaacggaagcaaagctgaaaaagctcttcgaaaacagatgaagaacagaaaaaaacgggaggcggccgcctcccgtttcagtttaaaataaaagcatgagaccggcgatggccggtgttaaaaagatggctgatttcagaatgactttcggcacgaggttggtgaatttcgctccgacatatgcgccgcacatcgttccgatcagcactttgaccaacagcatataatcgacaaatccttccgtcacataaccgagtcctccgccgaccgcaagcgggataatgacaagcatggtggtgccgaccgactggcggatggataagcgcaaaagaatcattaagccgatttggatgaaaggggcagagccgatcccgaacgttccggacaagattcctgcgatgacaccgagtacaacggctttcacccatatgttcagattgctttgctgtccggaatcttcttgtgtttcttttacaataaataaccggactaaaataagcagagcagataaaaacagcatgcccgccgtcaagtaatgcagcaaatctgcggggataagggaagtaagccttgccccgaaaaacgaaccgaatgccgcaaaaacgccgacgatgaggccgatcttcatctgaatattgccttcacggtagtggctgaaagcccccgacaaacttgtgaaagccattccggcaagggaggtgcctaaagccgtatgaatcggtacgtgaaacagtatagttaaaagtgcaatgacaaaaccggctcccccggcgccgataaacccgagaataatcccgagaagaaacataacgagtataataagcacaatcttctcctccatttagatgcctgatcaccatgttccgctccgctttatcaggttttaataatcgaccgtagtccgtcgaccgtcgtctaatatctttatgttacctcaaatttaaggtattggcaagaagccgaattgcttatatacagagggtttacagctctttcaccatcactttttcaccattgaagtccagctctccattgaataagaagccgaatttttgataaagccgcaatgcgtggacgttatcttcaaacaggcttaaataaatccgtctgcaatcatatatttgagtgagatgacggattagggcatcaagcaacagcttgcccaatccccgtccctgatagcgttcatcaataaaaaaacggtcaagccacactctgccgttttcattttcctcatcatattccggaaaccatccgtacatggcaaagccgaccaattccccgttaacataaagaccggccggctgataatgccggcaatcctcagcatcttgtaagcactcttccgcggtttcaataaatgaagtctggctttcccttacatgaagcgccagtatatcggcacggttttcttccgtgactgttctaatttcaatcgtcatacttgatactcctcttccgctttttttgagacggtaaagctttcattacgtaagccatttgtgaatcagccttctctcggatacaatgatcatcataaaggatatggttaccgtatagtcaaggaggcattatgagcgaagacgtcagaaaatacttcacaacgggtgaatttgcaaaactgtgccacgtaaaaaaacaaaccctgttccattatgacgagatcggcctgctttctccggaaatcaaaaaagcgaacggatacagatactattcctatcatcaattcgaactgtttcaggtcatcggtctgtttaaggaggtcggcgttcccttgaagcagatcaaaccgctcttaacagacaaaacccctgagggtatcatcacgcttttaaaagagaaatcttcagaaatcgaaagcaaaatcaaaaagctggagcacctgcaaaggatgattcggacaaaggtgaagctgaccgaacaagccttggagacagatttttcctccgtctcattgcagcgattagatgaagagacacttatgataggacggcccgtactccatttgccagaacggcaatatactgccgccatttcagaattgatccgctatatgcgggtacatgagctcgatcaggggcatccggtcggcggactgtttgcgcgggagcagattctgaaaaaagaattctacaactacacccatttttatatgaagacagaagaaggcatagagaatagagacctccatatcaagccgaaagggctttatgccgtcgggtaccaaataggggatgaagcggaagcggcttaccgcagcatcatgcagtttattgaagagtatgggctggaaatgggcaattatgcatatgaagaatatatgcttgatgaggttgtggcggacgggtttgacaatcagatcacaagaatccagctgcaagtccgcaatcgataaagccgatgccgccgttcatttacgtcttttaacaaaccttgtataatgagaaaaatcagtttgcaattgaggtgaaaaacgatatgtttctagcgcccttatttgaacatgatgtaccggcagcacttctccgcccttaatggaggaaagtgactgcgcttctctccgttagggcatatgacgtgacctaatatgataacggagggtgcatcaaattgaaaaatacattgttcggttcaatttatttggcattggccgccagtatctggggcggtatgtatgtcgttgtaaaagttgtggtagcggtcattccgccgcttgaactggtatggctgagatatgcggtggcgcttctttcgcttttgattctcagtttatttacacgccaatcctggaaagttcataaacgtgatttattactgatcgctgcgatcggattgatcggcaacacggtttcgatcgtcacgcaggaaatcggcacgaaattatcaaccgcgcagatgggtgcgattattacggcatccactcccgcatttatggttgtatttgcccggctgatgttgaaagaacggttaacgctgaaaaaaggaatatcgacagggctggcgacgatcggagtattgctcattgtggggaacggagatctcaatatgtcgagccagctcggcggtctctcgcttctggctgcggcgctgacatgggctttgatgtccgtgctgatgaaacgggttcccggccattactcaccgcttgtcgtcacaacgtattccatttgcgtcgcatttgtcatcctgaccccgtttacagcgggcccgcttcgggagattcctttgtctcagcttgcccggcctgagatatggggcggacttttatatctgggtgtgatctcaaccgcctgcgcgttcatgctttggaatcgcggattgcaattactgaatgcggcaagcggcggtctgtttttcttctttcagccgctttccgggactttgctcggctggctgctgctgggagagacgatcggaggaaccttctggatcggggcggctcttattgtttcaggcgtcgttctcgtcatgaaagaaaaatagaaaatgaaaaaaagccattcagcaaatgaatggcttttttctgttttcccggcaggattcgcccctccataaacagaaaacaaggagcagaaacggatcatgggcaccggtactctcaaggtgcaatatcctgactcttggggtttcgtcaattaacataacgggcggtgaaaaaatggagccaaaatggctagattgggcaaaacagcttcaatccgcggcgcaagcggggctggcttattccaaagacatatatgatattgagagatttgaagaaataagaaaaataagcgtggatatcatggcgcatcataccggcaccgacaaaagggtcatcaaagacgtattcgccggtgacacgggctatcccactccgaaagttgatatcagagcggcagtctttaaagatcagagcatattaatggtaagagagaaaagcgacggcagatgggcgctgccgggcggatgggctgatatcgggatttctccgggcgagaccgctgtcaaagaagtaaaagaggagtcaggaatcgacgtaaagcccgttaaactgttagctgtaatggataagaaatgccattcccatccgccgtccgccgcccacgtttacaaagtgtttatcaaatgcgagatcatcggcggccggatcagggagggaacagaaacaagcgccgccggcttttttgcggaaacggaactgccgccgctatctgaagcccgcaatacaaaaagtcagattgaaaagatgtttgcatatctcaaacatccggacgaacccgtttattttgattaaggcagcaatcagaaagaaaagggggcccgagtataatggaggattcaattaaacagcaggcgcagcggcaatttgccaaaaacgccgcgaaatatgtgactagtccaggacacgccgcaggagaggatttggcgtatctcgtttcagcttccggtgccgaaaagcatatggacgtgctggatatcgcgacgggaggcggacatacggctaacgctctcgctcctctcgtacgctctgttatcgcctatgacctcacggaagaaatgttagcagccgctgaagcatttataaccggaaacggatggacgaacgtgtcattcgaaaaaggcgatgctgaaaagatgccgttttccgatgctgctttcgatatcgtcacatgcagaatcgcggcgcatcattttcccgatgtcagagcctttgttcatgaagcgtttcgggttgtcaaaccgggcggcagactgcttctcattgacaataccgcacctgaaaaggatgaatatgaccatttttataatgacattgagaagagacgggatcagagccactttcgggcgtggaaaaaaacagaatggctccgttttctggagacagccggcttccggattgaatccgctgtctgctttttgaaaccatttcaatttaccgtctggtgtgaacgggcaggcctgactgaagagaaagccgcattactggaaaaacagatgctggatgctcctcgtgatatacagcggtttttttctgtagaaaaggatcaatcagaccgtattgcgggcttcacaggtgaatcggcctgtttctgcgcgatccgtcccgtctgagacgaaaaaaaccgctgtgcagttttcctgcccgcggtttttttcgtattatctgttcttgatttgagaaataatagcggaagtgacatcttccgttgaatgttttccgccgacatcaggagtcagaatgccgctgtttgtgaccgtttcaatagattgtaagaggagatggcccagttcctcttctcggaatgaatcgagcattaatttcgccgtccatatttggcctataggattggcaattccttttccgacaatatccggggcggagccgtgaacaggctcaaacatggaaggatatttgccgtttacattgatgttggctgcgggagcgattccgatgcttcccataatcgccgcgccgatatctgtcagcacatctccgaacagatttgaagcgacaatgacatcgaagcgttccggctgcgtgacaaagaaggccgccagtgcatcgatgtgctgggaatccgtctcaatcccggcgtactcacggctgacctctttaaagatgtcatcccagaacggcatcgagtgaacaataccgtttgatttcgtcgcgcttgtgacgtgtttccgccgacttgccgccagttcgaaagcataccgcatcactctttccgtaccccggcgggaaaagaccgcgttttgtatggcgatttcgtcctcaccctgatagattctgccgccgacagagctgtactcgccctcactgttttcgcggacgactatcagatcaaaatctttcgggttaacgaggggggaagtgattcccggcaggagcttcgccggccgcacattaatcacctgttcaaattcccggcgtatcttgatgagcagcccccacagcgaaacatgatcggggacgagtttttgattccccaccgctcccaaaaacaaagcatcaaagtgctgtaacctttctaatccatcatccggcatcatcgtcccgtgctccaaataatactcgcagctccacggaaaagaagtgaaatcaaaggcaatgcctccatgtaattcggcgatcgcgttcaacacccgctccgcttgagggactgtttctttccccacaccgtcccccggtatgctggcaatcttgtatgttttcatgtttccgtcacctctgaatgaattgttttcggtttacggcagactgtcgaccgtcgttcatcataattccatattacgccacatccgatatgctgacaagctcgggaatgttgcttccatagataaactgttatatgatcttggtaacaataaggcctaaattgtatgaagaggtaggaaagatggataattttaaattagataagccaatcccgtattatctgcaattttattcccaattgaaaaaaatgatatttgacgggatttttaaaccgggtgaacggctgaatgagactcagctggccaaggatttcggagtcagccggtcgccggtcagagaagccatgcggctccttgaaaaggacgggcttctgacggcagacgatcgaaacggctttgtcatttattctttgtccgttaaggatgttgaagagatttataaaatcagaatgtcacttgaatcactggcggtcgaactggttattgatgaagcggctgagagtgaaattgagctcattgaaaaacagctgcgggagacggaagaagccatcaataaaggcgtcaaagagactgagattatttccttaaacgagtcgtttcatcggctccttgtggatttcagccgcaacagccggctggccatgctgcttgagcatgtcaatgtgctgattcatttttgcagagttcttaattttaaaggcgatgaacgtgcggaggttattctgcatgagcaccggaaagtctttgaagaaataaaaaagggcgacaaaacaaaagccgtgcaatatatgacggagcatctcaagcatgatgaagaacatctgaaaggcgtgctgagagcggaagaaacagacgaatcatcacgatagacaaggcgaaatgccttgtcttttttttgccgatgtcatcgaaccgtcataaagacctgacggatgttccttgcatgattttttccgcgtcatttatgatggatatggaagagacgcaaaaaaggcaaaggagattgaaaaatggcgaaacatattctgatgatcaattttcccgcagaaggacacgtaaacccgacattgggtatgacaaaggccttcagcgatcggggcgatcacgttcattatatctcaacggaaaaatacaaaagcagactggaaggagtaggggcgaaagttcatcttcacagcgatctgctcagaatgacacccattgatcccggcagtccgtccggcatacttgcatttttaaaggttcatatcaaaacgtcactggagattttacatattgtgcagcggctggcagaggacattcaattcgacgccgtctattatgataaattcggtgcgggagagctggtgcgggactatctcaacattcccggcatctcttcttcagcatccttcctgttcaatgaagaccgtctgaaaatactgccgctccacccggaatcgggcgtgccgtttcagccggacagggaatgtgaagagctgttggccgagatgaaagacaaatacggtgtcgcccctgacagcatggttcaatttatgaacaacacaggtgaattgaacgtcgtctatacaagcagatattttcagcccgaaagtgagacattcggagatgagtatttatttatcggtccgagttttccgaagagaaaagggcgcgtcgacttcccgattgacgcattaaagaatgaaaaagtcatttatatctcaatgggaacggtgctcggggacacggaagcgtttttcaatctgtgcatagacgcgttctcagattttgaaggaaaagtagtcattgccgccggggaaaaagccgatctgtcgaaaatcaaacaggcgccggaaaactttatcatcgccccgtacgtgccgcagcttgaagtgctggagcaggccgacgtgtttgtcacgcatggcggaatgaacagtgtaaatgaaggcattcattatcaagtgccgctggtcgtcatcccgcacgataaagaccagccgatggttgcgcgccgcctgactgaattggatgcaggctataccgtgcaaaaagatgaagtgagcgctgaaaaggtaaagcttgccgcggaagaagtgctgcataacggaaaatacaaacaaggcattcaagccattaatgaaagctttaaagaatgtacggacatgaaggatgttctcgcccggatcgaccggtttattgaacaaaaacatgctcaataatacatggaaaaagcctgtttcctctgtcaaagggaaacaggctttttataatggcttttagatgatgtgatgttctgcatttgcaagtttcacaagagtcaaaagagattctgcctcacgtgcgtcgagtgtttttgccagacggtctttttcaaagatctgctggccgaagacattcactgacgcctggtcaaccgctgtgtgccagttcttttgtgaatgattctcagaaaaagagaaaacgaacacggtgaagaccgctataagcatcgccatgacccaaaatttttgccgatttcctgctgctgacataggccgcctcctaaacattttactggtattagatcatatatgagctgtttttaacagagtaaagaagtcattatttcatgtagtccaaatgaaacggagcacagccgaaagcccgccggtcaggccgatgagccaattcatattttgttcatattttattaaaagtttatccaagtctgtcctttacagtagatataaccacaaaatgctgctgaaaggagcctttaaaaaatgcatattcatatgatcaacaaaaaccagtttgagagtgacttggaggcggccggcttcagccgtcaggcagatgatattatcggcaaaatgaaagagtacgtaacggaatacgcggcttcatccgaacggttcctgattgaaattcaaaccgtcatgaacgaatacaaagccgtcgtctgcgcgatgttttcgactatggaaattgccggtgcaaataaagacgagaagcatgttgaattcgaagcctgcacagtattgtgtgaataaaagacattcatcaaacctccgcggctgcctgaacggcagtatactgactggtgttccggaaagggaaaatattgaaacttctaaagcggccgttcgtataaaagggtaaatcagcttgtatatggaggttcgtgaaatgaacgaaaagaaaaaacaagcgtttgaacagcttttcagcactttagacgaaagacatgaaataaacggcgctgtattggcagcggaaaacggccgcatcttataccagggttcattcggcgctgcagaactgaaaacaaagaggatgctgaatgaccaatcggtctttgaattggcctcagtatctaagccgtttacagctttgggcgttatcattttagagcagcaagggaagctgcgttatgacgatatgatagagcggtggcttcctgattttccttatccgggcattaccattcggcatttactccatcatacgtcaggattgccggactatatggagttgttcttaacacattgggaccgggacagaattgccgttaatcaagatgtgatcaatatgctcaagcagcataagccggatgcttatttcccgccgggcaaggagtggctttacagtaatacggggtatgtggtgttagcggttattatagaaattgtatcaggcatgagttttgctgaatttatgaaacaagccgtatttcatccgcttcgtatgcacgatacgcggatttataacagaaggctgagtaaagaaaacattccgaactatgcatatggctatgtgtatgatgttcattccggagaatatgtgctgccggatgaacttgaggaaactgattatgtcgtctttcttgacggaattcaaggtgacggaaccgttaactccgctataagagatttatatctgttttatcaggctctttatacggaagaaatcatcggcaaagagtctaaagatcaagcgtttacaccgggctattggaatgaagaagagcaattcggatacggatttggctggatgattcaaaacagcccccaaaaagggaaggttatcagtcacgacggaggctggccgggctattcaactctgatgatccggtatattgaccagaataaaacattcatttatctcagcaatatggaacaatcgtatcaatttgaacaagctgtaattgccgcggctgtaaacatcttatttgatcagccatacgtgattccgaaacgtccggcagatcagaaaaaagcagatatcgatcctgcgatttacagcagatttaccggcaattactcatttcaggatgacacacatgcatcggtggcggtaaaagaaaaccgattgtatcttacaatagacgggcagactccattcgaattattcccaatgacggaaacccgttattttgtcagggcgctgccgcttgaaattgaatttgcaggtgataaagcacaaacagccccgcatttcgttttatatcaggacggcacagaagaaacggctgtgcggatagactgagtgacatgcaaaacaaaaccgccgtcctgagaagacggcggtaatagaaaagtcaaaccccttagatgacgcgaaattttcttttcggctctgacataaatatagaagaaaaaatcatagctccgagcattgtgatgtattccatataaagcgaaacctctgccaaaaccaaccccgcaatcattaaaacagcgcccaataccaccgcaaaaaccttcgttttcatgatgagttccccctattatctgataaatgaattatactgcatctccattaatgtgtacattttgtgaacaatttcacctgatgaaaggcaataaagagagatttgaagaattaggagaaatgacaggccatctttttgttttactgaagaaacgaaagggaaagtgaaaaatcaaaaaggcaaaggagttcttgaaatgaaagcgagactatttttattcagcatgtttctcctgatccccgttctggcgcttgccggatgcaacagccaatcttcaggaggaagcgaaaaagcgaaagacaaagaaacgcactctcacgaagacatgattcactcaggttcatccgaggtgccgaaagatttaaagaaggcagaaaatccgacttataaggtcggcagtgacgtcatgattttagcttctcatatgaaaggcatgaaaaatgcacaaggaaccgtaaaaggtgcttatgatacaacggtttacagtgtgtcttacactccggaaacgggaggaaagcgcgtcgaagatcataaatgggtcattcaggaagagctgaagggcgccggggataaaacgttaaaaccgggtgacaaggccgtgatcgaggcatctcatatgaaaggcatgaagggcgccgaagccgttattgattcagccaaaaagacaaccgtttatatggtcgactatacaccgactgacggcggccaaaaagtaaccaatcataaatgggtgacagaagacgagcttgctgccgcaaaataaaaagaccgcaaaagccgaaggaattcctttggcttttttgcggtcttacatttatgcggattttcttttcaaagcgggtctcgttaaagagaatacagctaacgcgacagcgataatgacaatcaaaccgccgcaccaggctgttgctgtgacagaaccggtttgtccgatcacgccgccgccgatggctgacccgagcgcgatgccgatctgcaaagcggacgtgttgaagctttgctgaatatcggaagactcaggcgcaattttgattaaatagctttgctgcgccggcgcaaggctccagctgagcaatccccagatcaccatcgcaggcaggaaaatgattaaagaaaccgttgtcagcggaagaataaacaggatcagagcgaaagaaacggtcacaagcatgatgcttttaaatgctcctaaacggtcatacagccagcctccgaacgggccgccgcataccgctgacagaccgaacaaaaagtagcatacactgacccaaacggaactcaaatgaagcgttctttccaaaaaaggcgcaaagtaggcatagagtgtgtaatgccccgccaatgtaaacaaggtgacaagatgtgcgctggcaattttggcggtcccgatcgtcttgatctgctcacgaaacggaatcattttttcagcaggtattttttcaaaaaagacgctgataatcagcatggaaacgagagataatacgccgattcccaagaacagaacgcgccatccgaaggcattgctgatgataatgccgacaggcacgcctaaagcgattgcggagctgaaccccatgaaaatgatgccgatcgcccgcgctctgtattcaggcgccacgattttaggagcaatcgttaaagaaaggacgacaatcagccctgtgctcatggaagcgagaacccgtgacaccataagtacggcgaaattgggactgaaataagccaccagattacttaggaagaaaataaacagtgcgattaaataaagccgctttcgttcagcctttgccgtcaccgccaaaagcagcgggccggataccgcgtaaccgagcgcaaacacgctgatcagctgccccgcgctgacgatagatatatctaagtcggaagcgatttgcggaagaataccgcccacaattaattcaaccaatccgactgcgatggtagatgctgcaagcagaaatactttgaaattcatgtacagatactcctttttttattttttagaaaataaaaaatcctgattacaaaaagtgtacgggacaatttttgtaatcaggattttacggttcctggtagacaccctcaaaccatatcattgaggttatacaatgtatgcaatattcggttgtgtccgtttctgcaaaaattctaccataatagtgagggagattccatagaaaattcgaggaaatcctttcaatttcaatatcggcggctgtaacgtcattgatgaagcagggaaaaaaatttatgataaccgtaaggagtctatacagatcaaacattatacagccggaggaaaccgatgaataagtacgaaaaaatcgccaacgaaatgagaaagaggattaaaagcagtgtatatgacatagatcagccgatcccggatgaaaagacgctcgctgcggagttcgggtgcagccggatgacgatgaagcgggcgcttgatacacttgcggctgaaggaatgcttttcagaaaaagagggcacggcacgtttatcattcaatcagccatgcaggatgagcacgttcacgtagtcagcaacgaaattctcggtctgagcaatttgttaaaaggaaaaaatatcaagagcaaggtcatccggtttgaagtgcagtttccgtctcaagatgtcgccgcacatttggccattgatgaaaagactcccgtctattatgtagtgaggctcagaattgttgaaggcgaaccgtacgttcttgaaaaaacgtacatgccggcgagccttatacccggcattaatgacgaggtgctcaaccattccatctacgatcatattacgcgggaactccagctcaaaatcgcaggctcacacagaaaaatcagagcgtgcaagtcggatgatatggatcagcaatatctcggctgccggccggatgacccgatacttgaagtcgagcatgtaggctttttggacaacggcactccctttgaatattcattttcccgccaccgtcatgacaagtttgtcgtgacctcagtcaatataaaacgttcataaaagcgccgaagagtgagagaaaaactcactctttttttgttgccgctgatttacatcttcgcttcttttatgttatattacccaatgatagaatcatcctacaaatttcagaggtgttttgatggagatatccaaaacaagcagactgtcgctcgtagaacaagtggtgacgcaaattgaatcgttaattcaatcggataaatggccggtcgggacgcgcattccccctgagctggatttaatgaagcaatttgatgtgagccgaaacacattgcgtgaggccattcgggcgctcgtacatgccggcctgcttcagacaaggcaggggagcggtacgtatgtcagctcatccagtgttctcggcgcggcattttaccgccatattaaaaaatcaaatttgcttgaaacattagaagtcagatacgcactcgaaagagaagctgcgcgattggcggcggaaaggcgtaatgacgaagacctgaaagcactgaaggcatgcttggatgaatgtgaagcggccttgcaaaatgaagatcgaaaacggtatgccgaggctgacattaaactgcacaaaaccattgtacaggcggcccataacaacatgctttctgatctttacgagcatatgacggaggcgctttgtgcgtcagtccataacctgttggaaatcacccctgctatacggatccacacccagcttgccgccgcgattatcggacagaaaccggatcaggccatggaggccgtcaaccaatacatcacagtatttaaagatacaatacacatggaggatgaacatgaaaattaaagacgaacatcaaattctgcaagcaagtcagcgtaaaaaactgatattgctggtcatcggagtcatattgataggggccaacctcagagcgcctctgacatcggtcgggccgctcgtttcctcaattcgggacagcctcggcatgaccaatgcggctgccggcaccattacgacagtgccgcttttggcctttgcatgtctgtcgccgtttgttcctttattgtcccggcgcttcgggaccgagattgtgttactgtcatcattaattgtcctgacagccggaactctgctgcgctccatcgccggaatcggcactctctttttcggaacgatcctgttgggattgtcgatcgccgtatgcaacgtcctgctgccgagtctcattaaacataagtttcccggaaatttaggcatcatgaccggcgtctactcggtttctatgaatctgtgcggcgcgattgcatccggcatcagcgtgccgatcgcctcttcagcggggttaggctggaaaggcgcgctcggctgctgggctatcctttctttcattgcgtttgtcatgtggattccgcaaatgcgaggacgcgaactgcccgtccgcacgactgggacaaacggagagaagaaaagcagtctgctgcggtctccgcttgcttggaaggtgacgatgttcatggggctgcaatcccttattttttacaccgtcatcgcttggctgccggaaattcttcagcagaatggactcagctcaagtaaggcgggatggatgctttcattaatgcaattctcagtcctgccgattacttttatcgtgccgatcgctgccgctaaaatgaaaaatcagcgctcactcgccggactgacggctttatttttccttatcggcattgccggcgttcttttcggaagcccggctctcactccgctatgggtcattttaatcggaattgcgggaggctgtgcgttcagcttggcgatgatgttcttcagcctgcggacccggcatgttcatgaagccgcggcgctttccggcatggcccagtcattcggatacctgcttgccgcgttcgggccgctcgtattcggtttgctgcatgacatcacgcacggctggacggttccgttattcatgctgatcgcagtctccgttctgatcttcattttcggagtcggagcgggaaaagcggaacagatcaaaacagcataaaaaaacaaagggcccgcttagggtcctttgttttttatttaaaaagctgtctcaggccgtcacgttgtcagttttaagccgatgacaccgatgaggataagccccagagacaccaattgtgacagattgaatttttctttaaaccaaagtatgcccacggccgaaacgccgatgcttcccatgccggtccaagccgcatacgcgacacctgtgggaagaacctgcatcgctccggaaaggcaaaagaatgaaagcataaagcctgttaccatgacaatcagcggccacttttttttaaaaccgtcaatatgtttcatggcaacggctgctacaacttcctcagctccggcaataaataacagcagccatgccattaatgttcaccccttgtttcagtttctttcgtaaataccttcattcctaaaatgccggacaacagcaaagccaaaaagaatatttgcccgattgaaaacgattcgcctaaaatgacgcccgttacatatgtgccgacggtgcctattccgacaaaaacggtatatgcggcagccatcggaatttttttataagagcggatcagcatcagaaagctgacggcaatcagaaggaaaataccaatccaatcaaagagcgaatccgcatgcttcagggcggacgcccaaactacttctaacagtccggctatcaatacaagcagccaatacatgatacagtcacctcagttatgaatgaatgtcagtcatttttacggcggtcaaaaatgatcggtctctgccaatcatttctgcaagcttcttttgagaaagctgaatatttcttttttatatacttcgagatcgacatcctgttcacagccgatataaaaccgttcagccgcgttctcgacaacgttgataatcgttctggctgtccatctgacatgaatgccgctgtggacctcaccctgttcaatggccgtattgatcacgccttccagccaggaataataaggctgataaatggcttcccatttctccattgaatgatcgatggcaagaccggaataacagagaacgataatatctttatgaagccgggtgatgtgaaatgtctcatctaccaaaatgtccagcaacgtccaaaaatcttcagaaccgtccgttttcccttttattctgtccagcgtagtgtcgagcaggttttctgcaatcgcggatatcagtgcgtttttagaagaaaaatataagtaaaacgtaccttgggccgttccggcttttttgacgatttctgaaatggatgctttgtctaatcctttttcagaaatgacttcaatcgcggcttgcaggatcttttcgtattttcccgagctttgttttgccaatagaggggttcctccttttatgaatgactgtcattcattttatcgcatgttcgcttttttgtcatcccttaaaataaaaataccggaaagaagaccatacttctttccggcattcgtcatttatcactgtcgatcatagccttcggcagtcccgtatattttgcccagtaataaataccgagcgaaccgatggcgatcagaatcaggtcaagcggattgctgataatgcccaatccgtggccgaacgagccgagataggagaaaatcagcatcatgacataaaagccgacgatccaccatgctgatttcagctgctgccgtatgctgacatcatctttgggagcatatttactgaaacagagatagatcagaaacatgacaatttgagaaccgagaagccaggatacggtgcgccatccggaccaatatacaatataagaggtaaaaataaacgacagcggcccgatgatgctcatcccttttaaataaaacggtctgttaatattcttcgcgttgactctcagcgccgcagaagaaatcggcgcaatcgcataagacagaatcaatgcgacggagcatacgttgacaagagcgttccaagaagggaacggaagcgtccaaaaaacagccagaccgaacgaaagccaaagggaggcacgcggtgtcccggtttctttattgactttagaaaaaatgctgaataatgttccgtttctggcccaggcatagacgagacgtgaagtcgtattcataaagatatttccgttaccgcccggtgataaaatcgcatctaaaatgaccaatgtcgccagccaccccaaaccgagcaaaacggcgatatctttgaacggaagggagaattcagtcccgatagccggccatccgtgcttcagggtatccgccgggatcgccccgataaaagtgagctgcagcacggtgtaaataatagtagaaacgataatacagacaatcaatgcgatcggaatgttccgcttcggattctgcacttcactcgcgacagccacaatcggatgcagcccaaggtatgcaaacatgacgccgcctgtggaaatcgcggcctgaattccggtgaagccaaaaggcgcgaatccgtgaacggtcatattgcccgggtgaaaatgaaaaatcagtaccacaattaccgtaatcggtacgacatatttaaaaatcgaaataatgaagtttgctttcgcaaaggttttgacactccagtaattgaggaggaagaacaggcagagcagcgcaaattgcaatatccacccggcaattgtcggagaatcggagccttttacggtcaaaccgggaaaccaatacgccacgtattggcggactgccgtgacttctatagaaataagactcgtgtatgccacaatggtgacaaaggaaattaaatatccgacgaggtgtccgtgtgaatatacgggataccggataattcccccggtccgcggcagcgcggcgcccagttccgcataaaccaagccgatcaataagatgattcccccgccgatcagccaggaaaaaacgcctgatggacccgctttagaggcgacgttactgacggcaaacagccatgccgaaccgaatatggctcccatgccgattaaaataagatcaaaaagtgacatagttttctggaagtttccttgcttagacattcgctgcctccttagaaaagacattgttctctttacataattcccattatcattcaaacatacccagccggccggctggaaaattaggacaactttcgaaacgaagtatgtatagcaatgtgctcacattataataacggccgtatggcaagatctcccggcttatattccccgttttaaacacattcaaacctcatattcagaaaaacaaaaaacgcccgaaacaggcgtttttgttacaagttcatatctttcagtccggggctgtgctcattcggaagctcaggaagttccggcacggggaaacctttaggaggctcggacacacttaattcgccgccgtttcggctcggcgtcgttccctgcagaatttctccgatccgtgtcggatccagtctgaaattaaattgggtattatgataacccatctcaacgaatttccggcattccgggtatttttcaatatcataattcggcacgggaaataatttgccccattcgacacccagtgtttccaacgcttttgtaaatgcattttgatgggcgttgtcacggacgatcagaaaaccgagtgtttctctgaacgtctgatttgaactcatttcataaatgcgcgtcttttgcagcacgccggttgattccagcacgacattgtccaataaatcggaaatcagattcccgtggttgtatacccaagacccgttccatggattgccgccggcgtctacaggaagagaactttgcgctccgatgataaaatggtgcggattggcgtgtttaactgcttcgtcaagcggcgcctgatctgccgcctgatttccggggccctcagcgccgctttcgtcgagcagcgcattaatcgtatgctggacaagctcaacgtgtgcgatctcttctaaaaatacaccgcgaagcaggtcacggaactgtttttcttttcctctgaaattagagctttggaaaaagtattgcatcatcgtccgcatttctccgtagtgcccgcctaaaatttcctgaagcaccttggccgcggccgggtccggcttgtccggtttaatgatattgatcagctcttctttgtaataatacataaacagcgccccctgaaagaagttttcggttcttctgttagtgtctttgcaaagtcagtttttatgtatcggcatcaaaaaaaggacggaaagcgtgtccgtccttttgtgttaagcctcaaccgccccgcgaagtttcgtgttgacaagcccgttccatccttgatccatcgtactgtgaatctcggagcttttccgattgactttattgatgacggcttccggctctttccatccgccgtgaatgagagtgaattccgtatctccgctttccgtttcctttaagacaaaagaaacgatccagccttccgtatcccacgaaaaagaaaggcggtacggcgcttcaatatccagcagcttgcacggagacggaccgaacggagattccagctgaaactcactgtcttcttgaggtgtgaaatcattcggcataaaccagagagacaggccgtccgcagtggagaccgtatcccagacaacttgtatcggcgccttgaaaacggcggtatgaataatgtccggtaatggctgattgctgctgttgttgtttttgttatctttgttttgtttatcagacatgatgcgtaaccactctttcgctgtttttacttttgatcatactacacggggcaggacatttgaaaacaaatcaaacttattttatgcttttccaaagccattcaattcattttaaggagacgtagtgatgacagatcaatttaaagcgttagtagtcgatcaacgtgaagaccggttttcagtcagcgtacgggagctggcggttcaggaccttcccgagggtgaagtgctgattaaggtttgctactcaggggtgaattataaagacagcttggctgccattcctgacggcaagatcgtaacgtcgtatcctttcgtgccgggaattgatttagcaggaatcgtcgtttcctcagatgacgcccgtttcaaagagggggataaagtcattgcgacaagctacggcataggtgtttcccgctttggcggttatagcgggatggcccgcattccggcagattggatcgtgccgctgcctgaaggtctgacacttaaagaagccatgacgatcggaaccgccggcttcactgccgcattgtccgtccagcgtcttgaagaaaaccatgccgctcctgaaaaagggaaggtgctggtgacaggagcgacaggcggcgtcggaagctttgccgtctccattctttcaaccttaggttacgaggtcgaggccagtacgggaaaagaagacgaaagcggctatttgaagagcctcggagcaaagacggtcattcaccgtgacgaagtgtataacggcacgttaaaaccaatgcaaaaacaaaaatgggcagcggccgtcgatccggtcggaggtgagccgcttgcttcagttctcagtcagattcagtacggcggatcagttgctgtgagcggactgacagcgggaacgaaactcccggctacagtctttccgtttatattgcgcggcgtcagtctcttgggaatcgattccgtattctgtccgatggagacaagaaagaaaacatggcagcgtttagctgatgacttcaagcctgcagatctggaggcctttattcaaaaggaaattacacttgaagagctgccggatacgcttcctgctcttttaaaaggagaagcgagaggaagaacgatcgttacaatcaacgaagaataaatcaaaaacccccaactgctgattgggggttttcaatatataatcaattttttatcgaaaagagattaactattgatcatatagtgaaaatgagttgattaaaaacataaattgattacatataggtaatataaaggtaagttataaaattttctgaaatatttattgactgaaagcgcttttaaaattatgataataacataaatgccaataatatcattataacttcactacaaagtaactataaaataacaatttgacgagaggggagagtggataatcactataaatgataacgctttcaaattattttcttcttatataactgttttggacggtcagaacttgtatgcagacgttatgggtgcaaatattgataactgaatattccgatattatctctgtgtaaaaactaggaggatttgaagatgaataaaaatagcagccagcattcatttttgagaaccatcattttagtatcgacattcggggggcttcttttcggctacgatacaggtgtaattaatggggcgctgccgttcatggcggaagctgaccagcttaatcttactgctttgactgaagggatggtggcgagctccctgctcttgggggctgcgatcggagcagttttcggagggagattgtcggactataacggcagacgtaaaaatatccttatccttgccgttttgttctttgcagcgacgcttggatgtacactggcgcctaacgtatctgttatggtcatctcccgttttctgctggggcttgccgtcgggggagcatccgtaaccgttccggcgtatttggctgaaatgtcgccggcggaaagccgagggagaatggttacccaaaatgaattgatgattgtaacaggccagctgcttgccttcacgtgtaatgctgtcatcggcaatgtgcttggtgatacctctcacgcctggcgctatatgctcgttatcgcggcccttccggcggtattcttgtttttcggtatgctgaaagttcctgaaagtccgcgctggctggtttctaaaggaagaaaagaagatgctctgcacgttctccggcgaataaggaatgaagagaaagcgaagtctgagctcgctgagattgaatctgcctttcataaggaaactgagatggagcaggccgcctttaaggatcttgccgttccgtgggtgcgccgcattgtgtttatcgggatcggaattgcggtagtgcagcagctcaccggcgtgaattcaattatgtattatggaactcaaattttaaaagatgccggtttcgagacaaaagccgcattaatcggcaatatcgctaacggtgtgatttcggtgctcgcgacttttgtgggaatatggcttctcggcaaagtcggccgccgcccgatgctgatgacggggctgatcggaacgactgcggtgctgcttttgatcggagttctgtctgtcgtgctgaaaggatcgcctgctcttccttatgtggttctttcattaacagtcactttccttgcgtttcagcagggggctgtctctccggtgacctggctgatgctgtcggagatattcccgcttcgattgcgggggcttggtatgggggtcactgtcttctgcctctggatcgtgaacttccttgttggtttcacttttccggtcctgctcgcaaacatcggattgtctgcaaccttcttcatttttgtcttgttagggatagcgtccgttatatttgtgaaaaggttccttccggaaacgaaaggtctgtcgctcgaacagcttgaacaaaacttccgtacttatgaaaaaacagatcgtaatagcgcagaagccaaggtgagcgggtaatctggatagacgcggggttcctaggaatcctgcttttttatttattatatagaagggaataataagtgagaaaaaagtttcgtaaaagtgttgacctaatttgaagtgcatggtatattattaaacgtcgctgatgaacaaagcgaaaacgacaaatgagaaaatgatcttttaaaaaaagactttacaaattctcaaaagcgtgtataataaatgaggtcaagaaaaagacttcgaaaagaaataaaaaacacttgacatcataactgattggtagtatgatagttaagtcacctgataagcgcccgtagctcaattggatagagcgtttgactacggatcaaaaggttaggggttcgactcctctcgggcgcgccaattcaaacgcgggtgtagtttagtggtaaaacctcagccttccaagctgatgtcgtgagttcgattctcatcacccgctccattataatgatctttgaaaactaaacaagacaaaacgtacctgttaattcaaagttttaaataaatcgcacagcgatgtgcgtagtcagtcaaacactttatcggagagtttgatcctggctcaggacgaacgctggcggcgtgcctaatacatgcaagtcgagcggacagatgggagcttgctccctgatgttagcggcggacgggtgagtaacacgtgggtaacctgcctgtaagactgggataactccgggaaaccggggctaataccggatggttgtctgaaccgcatggttcagacataaaaggtggcttcggctaccacttacagatggacccgcggcgcattagctagttggtgaggtaacggctcaccaaggcgacgatgcgtagccgacctgagagggtgatcggccacactgggactgagacacggcccagactcctacgggaggcagcagtagggaatcttccgcaatggacgaaagtctgacggagcaacgccgcgtgagtgatgaaggttttcggatcgtaaagctctgttgttagggaagaacaagtgccgttcaaatagggcggcaccttgacggtacctaaccagaaagccacggctaactacgtgccagcagccgcggtaatacgtaggtggcaagcgttgtccggaattattgggcgtaaagggctcgcaggcggtttcttaagtctgatgtgaaagcccccggctcaaccggggagggtcattggaaactggggaacttgagtgcagaagaggagagtggaattccacgtgtagcggtgaaatgcgtagagatgtggaggaacaccagtggcgaaggcgactctctggtctgtccatatcgatacttgtgctctcggcacaacgtgccgatttgtttttccaaatggcgcttgggatgatccttcatcagattcttcttccaacgataataagacgctcgagagatacctaaatgaatacagatatcctgtacggtcattgtgctgtgcaatatttctacaagttcgactgacgtttcgctatcaacttcctttccaattcgttgtacttttttaaaacttcattctgttgtctcaggtaacgaatctctgcctgcagtttctctaaatcggaagaatactccggaccttttccgtaagtgtattgctttccaacaggctgttcgaatcgatgtgtatcaccagccttataccatctaacccatgtctgaacctgtgtcttattcttaatattcaactcctgcatgatctctttcataggtacgcctgccaatctcatttctacagccttctgtttcgcttcaaccggataactcactcttgtccccatagaaaaaacacctccaagtctaatttcggataacaacgatccgttttcaaacttgaaggtgttttttgtttgtctcatattatggggtcagtcccacgattgtcagaggttttgttgattattttgcttccagcctgcggatgcgctcatcgagatcagggtgtgtggagaacagtgacgaatgcttcttgccgttaatttttaacgtctgcaccgccgtctggtcctcttcattcacatgtcctgtataagacttcagcgtacgcagggcgtgaatcattttatccttgccggcaaggtctgcaccgccgcggtcagcgtgaaactctctatggcgcgagtaggcgaagacgacaagactgccgagaatggaaaagataatctgaaacacgatcatcgcgataaaatgaacgaccggcgcgaggtcttctttgacaaagcggcttgcaacccatgccgcgattcgggaaaggaatacgacgaacgtattgacgattccctgcagcagcgtcatcgtgaccatatcaccgtttgtgatgtgtgcgacttcatgggcaaggaccccttccaccgcagcatcatccatctgctgcaataaacctgaagaaaccgcgacaagcgaacggcgcttagaaggtccggtcgcaaaagcattgacctccggggaatgataaatgccgacttcaggcattttcgtcatccctgcggcacgggacaatctgtgcacgcggtcaaccaattgctgttcttcatagttgagcgactgtttcttcggatttaacacccggacgcccatcatcgttttggccatccatctggacattccgagtgaaataaaagaaccgacaaaaccgacgacaagactgaacacgagcaatgccatcagatcaatgcggccattttgtatatacgagccgacaccggtaacgcttgtaataatcgtaagcacaattccgattgtcgtaatgaccaaaaggttcgttaaaataaacagaaatattcttttcgccataattacctccgtcttttttaagatcaaaagaacttatttacttaaattataaatgatctgtttgaaaatgcaacaatttcgacgtatgatgttaatgtaattctcagtgatattaaaaaaagtgaacacgtaatcaatcagaggtgaaccatgaacacgtttaaactgacccgaactgatatggtccggcttctttacgcgctaaaaggccaaggagacgcaacccctctccaaatcttattgcaatcagcggatatgaccttggatgaagcggaaagccgtctgcatatccctgaatttctgacgagattcgaacgaaaaaaagagaaaaaggagtacgggctttcaactaacgagattgtcgagctgggaaatctgtgcgagctgacgtctttaaaatcaaccgccgtccaaaactgggtgaagcgcgatattaaagatttaatcggccaccccttactcggcaaaaaatatacaattgaacaagctgtcatccttctcattgtacgtgatttaaaatcaatttatgacttcgaacatatacgcggcatattaaaaatcgcttttaacacgatcacagacagatcagacgacgtcatcagcccgatcagctactatgaaagctgcgcccaagtgattgattatcttcatcataaggcaaacccgccgatgaaggaaacgagcctgcaggagctcgtcgaagagcagacggacaagctcaaaggctgctttaaagaactcggaagcggacaatggaacaatatcagatccataatcgccgtcacggtgctctccgttttgactttccatattcaagcctcagcctacaaaatgaccagccatttattataattcataacgcttcttcgccccggtgtctgcgccggggtttttttgttgtacaacaattgccagcataatcaataccgttccgtttgaaactaaaacgcgaaaacacatcttgccagagaaaaggagatgaaaaagatggcgagcagaaataaactcttagttccaggggctgagcaggcacttgaccaatttaaatacgaagtggctcaagaattcggcgtgaaccttagctctgatacagcagcacgcgcaaacggctctgtaggcggggaaatgacaaaacgtcttgtacagcaggctcaatcacaattaaacgggaaaaatcaataatgcagcttattcgccgggacttctcggcgaattttgatatttatcggcattctcctttccgtgccggtagccgttcggattccttcggtctgacgaatcttcatgatgccgataggattcccaatgttcattgcgatcatgattccagtaatgattgtaatacttttgcttaggctctttgtcatttccgttttcctgaggattttgtgttgggggctgctctgtttccccatcttgttccttctgtgtgttttcctctgatccggaagctgcatttttttcggtttgctgattgccgtcctgactgtccggcttcgcttcttccgtaccgggcgttgtttcattgtttcccggcttctctgctgccttttcttcatcaggagctgtcttttcatcaaccgccggcttgtctgtgtccggctgctcgctttgatcagcgtctgtttcggtatctttttgatctgtttcattgccgtcggtctgcttttcaggctgtttttcttctgttttcttttcgtttcttcttatgtagctgcctgttgacatcccttcctgttttgctttttctcttgtttccatatcagattcaagcgattggacctggtaggtgcccttatatttttcagtcatgtcgtccagctgttttttaacgccttttttatatgtattgtcatctgtattttcataaaccgtggaaattaaaatctcttttgattcctttacatatccatgcttgctgcaatcggtaataatattactgatgacttccttaaaatcgctgcttttccaatctccgatgtcactgatgacctgtttggcgtcatggttcagcggtgtcagttcaatgacttcatatttgctgtttaaagccatttcaatgctgggattaatgtcaagcgtcatatacgcgtaagctttgttatcagaaaaaaccgggagcaaaattaaaataaacaaaataatagcagtcatcgtaaatactcccaatttaaaagggcgcagtttcagaaaatcaaaaaagctggcccttcttcccatacgcgtttcgccttcgaacgtaatttcctctccgatttcacaagtgcggtgatcattttttgtttttaaaaattgtccgtcaggggttagcaacgtgacgaattttttatttttctctactatgatccctcttctcatgagtgcaacacccctttaagataatcttttaaataaatataatcaccggtaataataatactcatggcgatgatatattttcggttccgttcgatcgtttttctgctgaccgacacgagctgctccagctgcttgacaggaagctgttttttctggtgcaaaatggacgccagctcttcattttcaacaagcgtgtaggctaccttaatcgcattctgcctcgcatctgtatgcttcggcgattgttccagcagctctttaaaagacaggccgtattctttcagctgcttctgaaaaaaaagaatttcttcccggcgctgttcctgttctatctgtttgcggtattcatcaatggaaagctccgcttcgataaggctctgcgaagattcctggtcgtcgccttcctgcacatccatattgatatgctgagcggttcttgcttcttttctgatataatctatcacttttctttttataatcagctctgcaaatgcaagcagcgaattacctttttcagccgaatatttttcaatggcttcgttaaacgcgatcagcccgatgctgaattcgtcgtctttttcatctatatatcgtttacaaacggatgaaaccgtcttcgcgataaaaggcttatattgctgtattaaatcgttctgcagatctttgtcgcctttttgtattttttcaacagatgtttcaagcgtttgcttcttttttcccaatttaaacaaaaggctaagcactggtttcacctcagttcctccctataactactcataatcatagctaatttagtagggattcgcaaaggaagaaaaagagaaatcgatttcatttgtctcaattatgacaagccaataagacgtactatacatgatttcgtgcccccatgcagaattaagggggttttctctgtgttttttgtaacaatgctgttataaaattgttatcatatgtcttaaatgtaagcgtttcaaacaaaaaagggaacctgctttttaaaaagccagactccctttttgatcattttacgcgtgttctcttttttccgattccgcgccagactctatttgttttgctcctgacataaaccatccgcaaaccgcaatggtagccagaaccgcccagaaaatgattttccaggccgccgaatggatgacatctgccggaatgataccgagttcctcatgggccaatgtataaagagcgagcttcacgcctacccatccgacaatcacaaatgccgccgtttcaaggcccggcttggtttttagtaaggatacgaacattgatgcagcaaaacgcataatgattaaaccgattacgccgccggctaaaataacgagaaactgaccgccgtccaagccgccgatggcaggaagctgagttcccgggagcgttacggcaagcgcgaccgccgctaaaatggagtcaacggcaaaagcgatgtccgcgagctccactttcaagactgtctgccaaaacccgctttctttctgcattttttgaccggcgttatctttaaatacataccgcttcagcaaatggctgaccgcaatgtaaaacagatataaagcgccgacggcctggacctgccaaacattcaccagaaaagaaatggcgaacagcgacccgaaacgcaaaataaatgcgcccgccaatccgtaaaataaagccttcttcctttgtttttcaggaagatgcttcaccatcacagccatcaccagcgcgttatccgccgccaaaatcccttccagcccgattaaaacgagaagaacccatccatactccaataataatgcaaagtccaatccattccctccgtttcttttttctatcatccgagcttataccggcggttttttacgcaaaaaagacctttgccgatataaggcaaaggtcttgctagacatgaatgattggcatgccaacaaagccgatggatatgatccatgaattgacgactttgtttccggaatatccggacgctactcccctttgggatttcaagaaatatttgtttatacgctcatgataaagcctgtttcatcatttgtcaacgcttaacttttttaacaaattgagaaattttttctgttttggcccgctgttttcttctctttaaaaacatccaaagaatgagaagcaacacaatgaatataccgagcggcagcatatattgatcgagaatggaaccgacgcttttccaattttccccgagtttcattccgaggtatacgtaagcaaatgtaatcggcagcatcgctgcatatgtatatagagagaacacccagacattcatcttcgcaatgccgcacggtaaagaaatcagcgtcctgacccccggtataaaacggccgctgaacgcgaccaaacctccgtgcttctgaaagaaatcatctgatttctgcagggattcgggttttatccatatatactttccatatttcagcaaaaacggccgaccgcccagcctgccgattccatataagacaagcggacctgaaacaccgccgagcgaaccggcaaacacggtcccggcaagcgtcatatccccttttgagacccaatagcccgcaagcggaagaacaatttccgccgggatgaattctatactgagcgccaaaaaaattccggcgtaagataagcttttaaacgcttcaattattgatatgatgaaatcttcgatgatctatcactcccggcttacgtctatattccgaaacttaagaatgattttaacacaaaaccttgagtctgaaatatcttttagacatgcccgttataaatgtgagtcgtttcagatcggtatagcgggagggaatgacatgcgcaatacaacgtcccgcctgtctcctgattgcttgtctggcggcggttatatcacttaagttctccggaaaaattacccttcgcggtaagcggcggctgaccgcggattcagttcatatgggagcgggaaattttctcagtcactacatgggaatgcggggcatttcccggggaatgattttgtataatctttttgattaccactgatggttttcagggacttcagcgctttaaagaacttaccgattcactaattgtaaataaagaattcatttccttttcagccgaccatttccgcctgaggaaatggaacagcatacgctccatgaagcgccgcatcacccataagttgctacacatggaacggacccgtttatccacaataaagacaaaaaggagtttttattcatgcacacgatgtggaagggttcgatcagtttcggcctcgtcaatatcccggtcaagctcttcgcggccactgaagataaagatataaaattccgcagtcttcataaagaagaccatgcgccgattaaatacgaaaaaatctgcaccggatgtgaaaagagtctggaacctgatgaaatcgtgaaaggctatgagtatgtaaaagggaaatacgtcattatgacagacgaagacttgaaagacgtaaaacaggaacatgaagaaaaagcggttgagattgttgactttgtccagctgcaggaaattgatccgatttattttaaccggtcgtattatgtcgggccgggagataacggcacaaaagcctatacacttctgcgggaagcgctgaggacgacgggtaaaatcgggattgcctccattacgatccgctctaaacagcagcttgcgattcttcgcgtgtatgacaactgcatcgtgatggaatccattcattatccggatgaagtcagaaatgccggacatgtgccgggcgttcccgagcagacagccgttaatgaaaaagagctgcagacggcgattacgttaattaatgagctgacaaccgagtttgacccggaacaatacgaagatacgtaccggaaagcccttctcgctaaaattaacgataagctcgaacatgaagaagcgggcgtgacaccggctgctgccggcccgcgcgaagatgtcatcgatcttgtcagcgcgcttcaggcaagcattgaccggacgaagcggccggatcgcgaacaggctgcaccggcgcggccaaaagacgccgcgtcagcaggcggcggaggcaaaaagcagaagacgaccagacaaaaagccggaacgtcttaatcatggtgctgacgatgcagccgattttgacctctgtaccgcctgaaggcagtgagtggcgctatgaggtaaagtatgacggattccgctgtcttctccgcatagacgaaagcggcgttacattaaccagcagaaacggacagacgctgacgaatcaatttccggaaatcacggtttttgcggcccggtgttttcagcacatgaaagacaggttccccattacgcttgacggagagcttgtctatttaatcaatccgtacagagcggactttgagcatcttcaaatccgcggacgtttaaaacggacggaagcaattgaacgcaccgctgatagacggccgtgccgctttctggcatttgatctcctcgttctggaaggcgccggcaccgtctcattaccgtatgtgaaacggaaacgcgccctttccaaactgcttaaagaagcaaatcttcccgcctgccctcatcacttagcggaagaagcgattcaatacattccggaacacactgaatttgatgcgctttgggacaaggtcgtccgccatgacggagaaggtatcgtagcaaaaagggcttccagcggctgggcggaaaataaacggtctcccgactggcaaaagtataaacatatgaaaacggcacatgtgctattaaccgggtttaatccgaagaacgggtatataacggcctctgttttaaaagacggcaccgccgtcccgatcgcgtccgtttcccacggcatgcaggcggaagaaaaaaacgccgtcagaaccattatggagacccacggaaaaaaacaaaaaagcggcgagtatacacttgagccttctatctgcatgaccgtgcagtatttaaccatattgcaggacacgctgcgtgaagtatcttttgtgtcttttcagtttgaaatggattggacggaatgcacgtatcagcagcttatcctccgctctaaaacgctgccgccgaagctgcagttcacaagcctggataagattgtttttaaaaaacgtgaaaaaacgaaagcagatttccttagttatatggtgaaaatgagcgattttcttatgccctttcttaaagatcgggccgtcacggtgatccgttatccgcacggcgcgcctggcgaatctttttttcaaaaaaacaaaccggactacacgccggactttgtctcaagcgtgtttgacgggagccacgagcacatcgtatgcagcagcataccgtcacttttatggctggctaatcagctggcgcttgaatttcacgttccgtttcagacagtgcattctgaaaggcccgcagaaatcgtcattgatcttgatcctccgtcaaggaatgattttcctatggcagtggaggctgcgcatgtgctgaaacagctgtttgactcattcagcattacgtcattcccgaagctctccggaaataaaggcattcagctctacatcccgctttcaccggaagcattcacctatgaagaaacccgtgcgttcacaatgctcatcgccgattattgcgtcaggacgcggccggatctttttacgacagagcggtttatcaaaaaccgaaacggcaggctctacctagattacttgcagcatgccgaagggaaaaccattatcgccccctattcgacccggggcaacgaattgggaacggttgcggctcccctttattggagcgaagtcaactcctctttaacacctgatgattatacgatcgatacagtagtgaaccgcgtcaggacagagggagatccgttttatgatttttaccggaatccgcaggacggcccgctttcaatcgtgcttgagcaaatcaagagaaagagctgacgctttttgtcagctcttttcagtctgatacgtgcacatcaatttttctttggaaataaataaatagcaggagtaaggaatgtttctgagggtgagctgttttgcagtaaagtataaaatgggaatatgggccgctttcttaaacagcctgtagcagccgctggacggttttatcacatcaaaaccgagtctcgccgctcctttatgaagcattgtaatgccgacgactcccttaatctcgtctttccgtttatgctggttaatataatccgctaaatgaggcatggattgatataccttctgatatagcataatcccccttctgaccgcgctttcaataggctgcagctctttcaggagtttgacattatgaagatgaatcttaactaacacgtcgttttttttaattctggttccgtcgctcaggatgacatcttttcctttatatctagtcaaacggacgcggaatacattcgattgccgtttatcaatcagcgtcagccgggtaaagaagaaataaagcggatcaagtaagtaccatatagacagcagacagcttctcacatgttcaccttctttatattcaaagcaccctcatattttggcatggggcatgtcacattatgattggtaaataatgatgccgacctgtatcagcttatgcaaaaaccgcttcaggctctactgtccggaacagaaaaaaacactcttcgtgaagaagagtgtctgtatccgctttcttttaacggaaaagcaaatgctggctgtgaattcccgcttttttcagtaaggctatcagctgttcctgttcctcaggcataagtcctgaaaacgctctcgcaattctcaatgaatgaatcggataaattttatccaaatactcgtttcctttatcagttaaatgggcgtaaacagaccgtttgtccttagggtcttgttctctgaccaaaaacccgtttctttcaagcttgtcgatgacataggtgacattcccgctgacaagcaaaagacgcgacccgatttgctgaagcttttgcggtcctctcgtatagagcagctccaaaacggcaaattcagtcggattaaaaccgtgttctttactgtcgcggatgctgtgttcagacacactcttgaaagcccttgcaaaaactttgtacaaattcatcgaacgcatcacttcttcttcgttaaatgataatctcatcatatctaccccgtatttaagatttttataaaaaaataatgtaaacccttacaattcataagagtcgttctttgttttatattctattcgtgccgtttttcagaattccttcttttttatataaaaaaatacccttatacatcatttaatttgtataagggttccgttctttatagggaatgttccgaaaaaaatacgcgtattcctttctcagctccgtaattgtcatggaattgagtatttctttcgtatagactccgatctgcagaagctttttggaataatggtttctctctttgtccaatgcattttgaagcaaacgactcatggcagcctcctttgttttccgttattctatgatgagaataacgcttttatatcaaagacgtataaagccattgtaaaacttctgtagattatgatgtttttcggtaaagtccgttctgaacggctctgagcagcggaaaagcgtgttccccggcaatctgcatgaacgcctccagcatttcatcacgtttcatatctaattcaatgatttcttttgccagcgaaaccgctttttctttctccattcctatccttcctcctcattgtgtctgtacagtaagcataaaacggggcacaggaccatgcattaaccttgtcaatttttctgccgctttttttctaaaattttctattccgcgtcagaaaacctgacaagcgtcaggttttttctctttttttcttatataatatgagtaaaagacatccaggggtggaaaaatgacgacagacgaacaatcttacaaagataaaaaagtaatctcgatcggcattgtaagcgaattaaccggattgtcagtcagacagatcagatactatgaagaacggaaattaatctatccgcagcgttcatcacggggaacgagaaagtattccttcgcggacgttgagcggctgatggatattgccaacaagcgggaagacggcgtgcagacggctgagattttaaaagacatgcgaaaaaaagaacaggctctcaaaaacgacccgcagctccgcaaaaaaatgctggaaggacagcttaatgctcattttaagtataaaaaccgctgatcaaaaaagtccgcctcctgtgagacggactttttttataaagcatgaagaaatgcagttgcaatgccgaaataaattaataaggacaaaatatcgttcagcgtcgtaatcagcggtcctgatgcaatcgccgggtcaatgttcagtttatgaagaataatagggacgatcgttccggccatcgtaccgataatcaacgttgcaagcagcgatgaaccgacgacaaaaccgagcgttaagtctttctgccagacggttgcgacaatcgtaatcgcgatcgcacagacgatgccgatgtagataccggttcttaattcacggaaaatcagtttaaagatggtttttttattcatttcttctttagccagtcctctgatgacgacggcgagtgactgtgtgcctgtattacccgtcgttcccgcaatcattggcatgaaaaacgcgagggcgacgactttttgcaatgtatcttcaaaataattcagaatgcttccggaaatcaatccgataaacaaaagcagaatgagccacggcaaacggcggtacgccgcaacgtacgctttcgtatcaaatgtaatcgccttaccggaggctgcgaatttttcgtaatcttcatcggcttctttaatcacgacgtcaataatatcatcgacagtgacaataccgacaagcacatgattttcttccacgatcggaatggctaaaaagtcataccgctggatcagccgggcgacttcttcctggtcttggagcaccccggccgagatgacacgcgtaaacatgagatcctgcactttatcctcaggctcgccgagaattaaatctctgtaagagagcactccgacaagctgcttgctgtcattaattacgtacaaataatttattgattctgcgatttctgcaaagcttttcagcttcacaaccgcatcttttactgtataatgctgcggaatccagacgaagcggttcgtcatcatccgtcccgccgattcttgcggatagttcatcaaaagctgcacggcctttgattcctcagcctccatgctggataaaagctgttctttcagttcttcatccatctcttccagcaatgcggcgagatcgtcgttatccattttattcattgcgagagtggctttcgttttaccgactttatgcaaaacggcaagctgaaattcccgctccagctctccgatcatgtcggtgatgtcatcaaccgtcatatatgacagatagcgggcccggtgcttttccggcatttctttaaacaaaaatgccatgtcatagggctgaagctcatctatcatgtttcggaattcttttatttttccgtcccgcaataaaatgataatgcgtaatatgagttcgtcataggtcatgttttggaccatcgggactcgtacctcctttacggagacgcgccgtccgtcaagggaagtgcggcggtttgtctcctcatcatgtcgtcactggttatctggctgtatatgggtacttcttctgacatactcgaatggggagaatccatactccgcacctccttatcatgctcagtcgtgtacgttttgaggcataaaaaaaaccttctgatatgaaggcgaaaacaagcacggcaaataaacgtgcggggcctccaatcgtagagctttagcactgtatggcataggacagccatccagctgcgttaagaatcaccttatgtcgatgattcctgttgacccattggcgtctttggacatttttgggcagcagcgtatctccatacaggagcctcacctaacgaagttcttatttgaattgacacactgagattacagaaaaaaaaggaatgtgtcaaccttaaatttgtgatttcagcacatgcctataaaataatcggaataaaggcataaagcccttattccggcaaatcgctttcatcctcttctgaaaggaaatgataggattcatgcagcatgagcgcgtactccccttcttttgtcggatgcggtacatactcagcctcgttgatatactgctcttcccttttcttcatatgacagacctcctgttcaattttagattgtccaaaagaagacccgttatcataggaaaaaaatcacttgcggagcgggacatgcagctatatttttcggatcgtgaaaaagttcctaagcagccacgggcccggtttgaaaccgagcgttaattgccacgcgccgatcgcctgcagtccgaactcccgaacgagaaccattttttcactcatgctccgcacatcctcaaaccacacttcatgcgttcttccattttcatcagtataccggaagtaaggggaacgctcctgctgggaataacggatcactgattgatgcttcattgccgtttccatggcgcgctgattggagatggcggatccgatcgttccgggacggtacggaatcacccaatcatacccgtacagcggaacaccgagaatcacttttcttctcggcaccctgctgatggcaaaattgatcgtttgcctgacctctgtcaaaggcgccacgggtcccggctcactgccggcgtggtgccagtcgtacgccataatgaacatataatcgacgacggttccgattccgccgtaatcatatcccctcagccacggcactgcatcacttgttttcgccggaaccgatatcgttaacgcgagctgatgctctgaaagccgggtttttaactgccggagaaatcctgtgaagaggtccctgtcagcttctctgacccgttcaaaatcgatatttacaccgccgtacccctttcttacggttaaggagacgatattgttgacgagattcgttcttgccgtcggattttgcagcacttgatgggctaattccggactgaatcccccttctgtcagattcgtaatgacggcaagcggacgcactctgttctgccatgtggtttctattgcggttctgtcgtttaaatcgttaatgatatctccattcgggccaaaatgatattcaaacaaagaaatcgccgaagaatacggcgcaaaatcattaattagctctctatccgcttcaggcgtccgaatgacataaaattgcagggttcccgcaagatagttagagatatcaggaatcttcactttcatacccgcccgcagccggttcggcggaatatccgggtttgcctgcatcagctgcatctgcggcacataagccttacctgcgataacggcatacgtatcattcggctgaaccgtatattcattaagagggattaaaagcgcctgccccggaacgatattcgtttcctcaagcccgttgacgcttctgatgctgtcaacagggtatccgtactttctgctgatggaaaataacgagtcaccagactgcactgtatgaacaaacatagatgtcctccgtttccttttgatcaaaagggctcttcttatctttatgaatgatcatccggtccgattccaaactctgttggagaaaggctgtttacaaatcagacatgatcaactatgatgatgtcatcataaaaaactgtataggaaacgcactaggggtgctgttatcggctgagataaaacatgcggcaggcgtgttttgatcccttataacccgatctggataataccagcgtggggaagtgcagattgaccggagcgcagggtttttccccatgcgttttcgttctgctgctgcatattccctcggatatgcagttttttatttttcattaaaaaacgggggaggacaccgcaatatgaaactgaatataaaccgcctgtaaaatcaactctttcatacatacgactatccgataagaaagcaggagatcagaatgaaaaattggaaaatgagagaaattgtcgtcatgtccgtcatcagtgttgtatttgctgtcatttatttagtatcaactcatgcaagcaatatagcggcaggatttttcggccggatgagctacgaaccgatttacggtatctggtttatcgtctcggtgattgccgcgtacattattcaaaaaccgggagtggctcttgtttctgaaatcatcgccgcgtttgtggagtgcttactcggaaatccgtcaggaccgatggtgattctgatcgggatcgcacagggaatcggtgcggaagcggtcttttttgcgacacgctggcgggtgtataccctgcccgtgcttcttttatccggtatggggtcttctgtgacgagcttcatttatgacttgttcgtttccggatactctgttttgaatccgggtttattagccgtcatgcttctcatccgtctgatctcaggtgcgcttcttgccggccttctcggcaaagcaatcagtgatgcgctggcttacacaggagtgctgaacggcatggcgctcggaaaacaattcaagaagaaaaagaaacaggtgaaccaagatgcaggcatctgagccccttctatcggccggccgtcttaccttttcttatgatcaggatgaaaagccgattcttcaaaacgtgtcctttcagctccgcaaaggagagcgggctttattgctcgggccgagcggatgcggcaaaagctcgctcgctctctgtttaaacggtctgtacccggaagcatgcgatggggttcaatcgggaaccgtttctttatacggaacacctctttcacatctgacagaacccgccgccagatccatcggcgtcgtgtttcaagatccggaccagcagttttgcatgctgacggttgaagatgaaatcgccttcggcctggaaaatttgcaatatacaaaagaagatatggacgcaatcatcgatgacgttttggcaaaattagagatcactcatctgaaaacgcgaacgatcgcttcgctgtcaggcggttcaaaacaaaaagtggcgcttgcctgtatcattgcgatggaaccggaactcattattttggacgaaccgacggcacagcttgatccatattccgcacgtgaattagtgcggctgatcaaagatcttcaagcaaaaaaaggcttcggccttctcgttatcgaacatcagcttgatcattgggcgccgtggatggataggacgattgtccttgacgaaacgggtcagaaggtgatggacggagagacggacgttatctttgagacaaagattgaagagctgatgcagctcggcattccgattccgcgtgtgatctcattgcaggagcacgtcagcattccttttacattgtgtaaagaaaagctgtttcaagaatctgtaccgtctctgcccgaaccccggcccgccgcgctttcggcagaagacgcgctgagcgttcacgagctgtcattctcaagaggggcagacgtcatttttcaggatgtgagcttttccgtaaaaaaaggttcaatcaccgcgattgccggtcctaacggaacaggaaaatccacgctcctgtctgccgcggccaagctcatccgtccgctgggcggagacatcaaaatagacggcagaccgattgattcctattctgaaaaagagctgcggcggctgatcggatatgttttccaaaatcctgaacaccagtttgtcacagattccgtcattcaagagctgatattcggttttgaaagcagcagagccgcaaaggagaaagctcttcagctgttaacccgattcggcctgagacgccatgcctcacagcatccgttttctttaagccaaggacaaaaacgccggctcagcgtcgcaacgatgcttatgcacaatgtgaacgttttgatgcttgatgaaccgactttcggacaggatgccaaaacggcgcgggagtgtatgcaaatgctccgtgagattcaaaaggaaggaacggctgttttgatggtgacacacgatatggaactcgtctcagattatgccgacacgatccttgtgctctgcggcacgaaactggtattccggggaactcccgacgctttattttctgataacaccgggatcgccgagcaggcgcatttggctttgccgctgcggtatgaatggatgagacacgacaggaggcggagaaatgaacttgcggctggaggctgttaacccgtcaataaaggcggcggctgtattgttatgcgtcattatgctgtcgtttatttataatccgtacacccctgctttgttttatatcatcattgcgggaggcgtcctctcggcggggcgtgtgccgctgaaaaaatggctgctgttcacgattccatttgtcattctggccttcggttctttatggacagccgccgtattcggaaacatcccgacaaccggaagcaacctgctgtttaagctcgggccgattgccgtcaacagtgataacgcggcgcttgggatttctatcgcctttcgcattttatgtttttccgctttgtcgatgatgtttcttttcacaactgatccgattctgttcatgctcagtctgattcagcagtgtaagctgccgcccaagcttgcatacggcgttatcgcggggttccggtttctccctcttctgaaagatgaaatcctgatcatccggcaggcgcacagaatcaggggcgcggcgtctgattccgggctgaaaggaaagctctccgccttcaggcgcttcaccattccgctattggcaggcgcaatcagaaaggcggaacgcacggcgatcgcgatggaatctaaaggctttacggggagccgaaaccgcacgttttacagaactgttaccgtgcgccgcgccgactggtgctttttcctgctcgtgcttctgttattcggcgcaagctggctcatttcattgttgtttgtataaaaacaggccgccggagtgattcggcagcctgttttgttatgtatgttattgatgataattgagagcctgagcgagattggacttgatcgtaatatctgagaaattaatgccgagctgtacggcggtttgagcgatttccggcctgattccggataaagtggacgtgacgccgatcaatttcagcgcctcaactaatttaaaaatctgatgcgccaccatcgtatcgacaaccactacacccgacaggtcaattaacagatgttcaatcagccgttttgcacatgtgctcagcgtattttcaagaatgaatttggcgcgctccgtgtcaatatcgccgacaagcggcagcagcgccgtccgtttgctcagcgtgataaccggcgagcttaactccaaaatcatttctctttgcgcattcagctgcatttttgagttatgctcggcatgatcgacaaacgtgtaaatcgtaaaatcaaatacttgtacaattaaattctcccatttcttcctttctccctgtgcaaacgaagattcatgtttatcggcaaacgcatcataataactgatgtatagtctccggtttctcatgaattcacggaccacatactgtacgggagtatccagatgcttctggtctttcgcaagctcaatcacccactgctcgaactcttctaaaaattcttttttcggcatgatatacattttattaatatgccggtaaaattctttatcctgctccgtcagttcttctgtgatgacgggatttgtcaaagaataaatcgaattcggatccgaatcttccatcgtttcgatccactctttcgcaatttgatccacttgttctgaaaaatagttgtataatgcttcacttatcttcatatctcttctcctttcccatttccaattataccgtcagcggatcatgaatgaaaataaaagctgttaaactatccatttatttgaagttttttagtgcgatagattacgccttttttatgaaaatgcttcaaatgactctttccggccggcatgatctgccataaaatagtagcaacacccttgtatccactcgcaagcataaaaaaggagggcttttttatgaatggtgaaatgcatttgattccttatgtcacggatgaacagatcatggaggtgaacgagcttccagaggggattaaagtgattaaggcgccagagttgtgggcaaaagggtttaaaggcaaggatattaaaatcgcggtgcttgacacaggctgcgacatcaatcatcctgatttgaaagaccgaattgtcggcgggaaaaacttcaccgatgatgacggaggcaaagaagacgcgatttccgattataacggacacgggacacacgtttccggaacgattgccgccaatgattcaaacggcggaatttcgggtgtcgcgccggaagcaagccttttaatcgttaaagttctcggcggtcaaaatggcagcggcaaatacgaatggatcattaacggcatcaactacgccgttgaacaaaaggccgatatcatttccatgtcactcggcgggccaagcgatgtgcctgaattgaaagaagccgtcacaaatgcggtaaaaagcggtgttctggtcgtttgcgcggcaggaaacgaaggcgacggagacgagcgtacagaggaactgtcgtatccggccgcttacaacgaggtgatcgcagtcggatcagtctcaatcgcccgtaaatcgtctgaattttcaaacgctaataaagagattgacctggtggctccgggagaaaatattctctccacccttcccaaccataaatacgggaagctgacgggcacttcaatggccgccccgcatgtgagcggagcgcttgccttaataaaagggcttgaacaggacgcgtttcagcggacgctttctgaggctgaagtctacgcccagctcgtgcggcggacccttcctttggacatcgccaaaacattggccgggaacggatttctgtatttagacgcgcctgaagtactgatggaaagagccgaacaggcacagctgctgtctttctgatatttttctcatataatgattaatcagcttgtcacatcaccaatttttaaaatgtgagattttctattgacagtgatctgaataagctgataagataaccaacaaatgatgtaacttttcaaaaaaattgaaatattttctcttatcgagagttgggcgagggattggccttttgaccccaacagcaaccgaccgtaattccattgtgaaatggggcgcgtgatttttgcgccgagacgactgtctcataaggcacggtgctaattccatcagacgtgatctgagagataagagaggcttgcattttgaagttaaagcctctttctctcatgagaaagaggcttttttgttacatctcacttaaaggaggaaacttaatgacaacaatcaaaacttcgaacctcggttttccgagaatcggcttgaacagagaatggaaaaaaacgcttgaggcttattggaaaggtaacactgacaaagaaacgtttcttaaagaacttgacggtttattcttatcagctgtcaaaacacagcttgaccaacatatcgatatcgtgccggtctctgatttcacccattatgaccatgtgcttgatacagccgtcagctttaactggattccggaaagattccgcagcatcacggatcccgttgatacatactttgcgattgcccgcggtgtaaaagacgccgtttccagtgaaatgacgaaatggtttaataccaactaccattacatcgttcctgaatatgacgaaagcattgaattccgtctgacgagaaacaaacagcttgacgactaccgccggatcaaagaagaattcggagcggaaacgaaacctgtcatcgtcggtccgtatacatttgtcacgcttgcgaaaggatacgaagaatcagaagcgaaagcgattcaaaaacgccttgttcctctttatgttcagctgctgaaagaacttgaagctgaaggcgtaaaatgggttcagatcgatgagccggcccttgtgacagcttcttctgaagacgtccgtgccgcaaaagaactctatgaatctattacaaaagagctttcagggctgaatgtcctcctgcagacatacttcgattcggttgatgcatatgaagaactcgtttcttatcccgtacagggaatcgggcttgacttcgtgcatgataaaggcagaaaccttgatcagctgaaaaagcacggcttcccgaaagataaagtgctggcagccggtgtggtcgacggccgcaacatttggaaaatcgatgttgaagaacgccttgatgcagctctggatatcctcagccacgctgatgttgaggagttatggattcagccttcaagcagccttctgcacgtgccggtggcgaaacaccctgacgagcatcttgaaaaggatttgctgaacggcctgtcatacgctaaagaaaaactggcggaactcggcgtcttaaaagaagggcttctgtccggcaaagcggccgtcagtgagcagatcgaagaatcaaaagcggcacttaaggctttaaaagcattcgcaacaggagcgaactcagctcaaaaagaagagctgaatcagctgacggaaaaagatttctcccgtccggcaagctttgaagaacgattggcgctgcagaatgaatcactcggtcttcctcttctgccgacgacgacaatcggaagcttccctcaatctgccgaggtgcggagcgcacggcaaaaatggcggaaaaaagattggacggatgaacagtaccaagcctttattaatgcggaaacgaagcgctgggttgacattcaggaagaaatcggcttagacgtgctcgttcacggagaattcgagcggacggacatggtcgaatacttcggtgaaaaactggccggattcgcctttacgaaatatgcatgggtgcagtcttacggttcacgctgcgtacgtccgcctgtcattttcggagatgtcgaatttatcgaaccgatgacggtaaaagatacggtctacgcccaatcgctgacggaaaaacacatgaaaggcatgctgacgggacctgtcaccatcttaaactggtcattcccgcgtgtggatatttcaagaaaagaaatcgccttccagatcgggcttgccctcagaaaagaagtaaaagcgcttgaagatgccggtattcagattatccaagtggatgaacccgcgctccgcgaaggactgccgttaaaaacgcaggattgggatgaatatttaacttgggccgcagaagcattccggttaacgacgtcttctgtgcaaaatgagacgcagattcatacgcatatgtgttacagcaactttgaagatatcgtagatacgatcaatgatcttgacgcggatgtcattacaatcgaacacagcagaagccacggaggatttttagaatatttgaaagaacatccttacgtgaaaggcctcggactcggtgtatacgacattcacagcccgcgtgtgccggcaactgaagaaatctatcaaattattgatgacgcgcttgaagtgtgtccgactgaccgcttctgggtaaacccggactgcggactgaaaacaagacagcaggaagaaaccgttgcggcattaaaaaatatggtcgacgccgcgaaacaggcacgaaaaaaacaagctcagcttgtataaaaaaacagccatccgcaaatcgcgggtggctgttttttctgggcgtgctacttattcttcagcgccttcgcaagttcacttagtgaatcatgctgcttaatttgatagcaccgcccttctttttgcaaataccctttttggcagaattgcgtcagcacatgcaagagatgacggtaagatacacccaaataatcacagaccgttacgtgcttctctttataaaccccttcataagccgtctgcaaaataaaatcggccagccggttttcaagcgggaacgccagactttgtgaatatttcgaagccataagcgttgccttagcacttaaaaacttagccaattcacgcaggaatttcgcatcttgcagcaattgcgcgcggcagcggtaaataggcagagcaaaacaaacagtcttcactgaggcttgaattccttttgtgtaatacacttcatgtaatagttccatctctccgatgtaatcatctttgttgataaaattaattaaagaaactttcccgttttggtgggttacatatattttcgcttttccttcaatcacgtaaaacaggaagtcaggcctcctgccctcttgaataatccattcgtcccgctcatattcgcgcacttccataaactcttcagcggggaaagagaataaatgcgcgattgagtgtttttctaactgatgccgctttttctcgcctttataaacttccatcgtccaccccaaaaatatgagatatctcatattgtctttatgtctttacatgataacatgccaattaaaggaggaacgggaatgaaagcatatcgctggatgagtctgcatttttttagtttttttatgacatggggtgtttttctgccctattggacgggatggatggtgcatataaaaggggtttccgtatccgaagccagtttcattatgagcctgggcttggcggcaagagggatttccacattattattcttcccttatttatcaggaaaattcagcagcaaagccttattaaacggcgccagaatcgggacgcttctcgcacttttatgttatattcccgctgattcttttcaaagcctgcttcttgtcacattagtgctgcatgtgttttaccctgctttaatgcctgctttagacagcgcttgcggcgtccttgtacagcataacgaattaaaggcctatgggacaagccgacagtgggggtccgcgggttttgtttcagccggcgtcatcctgtccgtctttacaggtatattcggagatcaagcgattttatgggcactgcttttgggcaccctgatattcgcatgcctcagctttatgcatgcgccagctgttctttcaaaacggccggaaacagaccgcgcaagaaaagagggcatgtttgccttattccgcatcaaatatttcggtctggtgctcgcaatcgttatcttactgcaggcggcacatgcatcttactacaattacggttatctctttttgcaggaaatcgatgcccccgcatatgccatcggaatcattatcaacatcgccgttatcgcggagattatcttctttgcaatcgctgaccgatactttcatcaatttacagcaggctctttgctcgccttggcggcgcttggtgctaccgtacgctggatactcgtatttgcatttccgcatgtcatcattttctgtattgcgcagacgctgcatgcctgttcattcgcgatgggacactatgcatttatgaaatacttaattaaaaatatttcacccgcgcaaatcccgaaagcccaaggcatatattcagcgcttgctctcagctggagcactgcggtatttactattttcggaggttttttatatgaaattgaaccccggtatgcctttatcggaatgattgtttgtacgatcccatccatgctactcgcccttttatacagaaaacttgaaatgaaaaagagagtttttgcaggaaacgcacaagatatatagccatcgctttatagacgatcacatgtcccgctgtcattttgaccgatttgcgaatgctgtgcgatgtattttctctatatttaaagtatttccttcatatatgatgaaatcaaaaacagtggtataacccgctcaattggtttataaagggaatccattcagaaacttggacagaatcagtgaatatactgatacagtactgcttacgctcatttcggggaactttgttcgtaataaaatgattttcagccaactcataaggagggacattgtgtcacagcctaatttgcccaatatcacccctgtcgttacactttccagagacgataccattaaccttcttctttcgtcaattgctatggaagagctgggaatggcacatattctgaatgcggaaggggaaaaaatccaatacgcgctcggaacgattcccggattaacagggcccccgtcaagtcttgcggatattcttaacctgaatgagagcgtccgtgatacgcttgacagcttaatgaaacaggagcttcttctcggttcaaaattggacagtatctcaaatatccctacactggcgggaccgactggtgctacggggccgacgggacctacgggagcaatcggaccggccggagcgacggggccaaccggatcgatcggaccgacgggggtcaccggtgcgggccttcaagggattgttgcttttaatccgctgattgctcccacttacacaaccggacaggttgtcttgtataacggaagctcttacgtcgcaaacgtaaacagcccggcgggaacccctggagcctcagctgactatacacttttagctgcggcgggaatcaccggcgctactggcgctaccggaccgaccggaatcaccggcgctactggcgacacaggaccgactggaattaccggtgctactggcggtaccgggccgaccgggatcaccggcgctactggcgctactggaccgatcggaagcaccggcgttactggcgacaccggaccgactggaagcactggcgctactggcggtaccgggccgaccggaagcactggaacaagtctgacagcaacttccggctatgcgagcaatacgggcggcggtgttgtcgcagttattgtcggcggcacgaccatttccttaccgaatgaacaaaacctttcggcagatattacggctaatgccgcaaataccatatttaccgttgctccggcgggacggtactatatttcctaccatattaatttaacggccggcttgcttgtaagttcgcgtattttaatcaacggcactcctcctgcaagttcgattatcgccccggtcgcgtctttggcaaactttaataactcctttattgtgactttgccagcaggcagcaccatccagcttcagctgttcggattattgggtgcggccacattgcttggaggaagcaccggtgcagctttaaacattattcgattatcttaatggaacatgcaaaaaaaggatcaggcgtttgtccgctgatccttttttaattgagacagaagttctttcgcgggtttaaattgaggattgaacttcaccgattttttggcgtaagcgatggccgtcatatcatggtttaatgcagcatggcatttcgccatataataaaaggctctgaaatcggcggcaccttttaaaatgaagtgatcagcgttttctccttcaacctgcgttccgttttcaaatgctttgattgccgctctgtacttttccaaatgatataatacaaggcctttataataatgaagattgctgtaatcaggatatagcttgagcactttttcaatcccttgttcggcttcttcataccgtttgagctcaagcaatattgtatatttcaaataatacaggagagacggaggcattcgtttttcgcttaaaaattgaaaaattgagccgttgacaagatgtaatgctttttcatagtctttgattctgtagcattcacttgccaaatgatagacaagccacggatcaggattttcctctgaaagctcttcatttaaaatgctgatattccgtttatgtttttgcttgatcttttcttcctgctccaagtagccgtagtgatgaatcacacatgggagcgtgaaaaaagcattgttttcttcctcattggaagccgagatattctcgtgaattctgccttgatacagaaggcctttatgattgcggaacagtctcggctgcatgctttcaaacgcttcgttttcatcgagctgcttccccgtataattgatgattttcataagaccccggctcggtaatccgtcatgaagcagcgaagttaaaaaacggcccgtctcctgatcgagctcttcatccgcgtcaagcactaaaatccaatctccttcggcatgctgcagggcgtaatttctggcctttgcgaaatcattctcccattcgaaatcaaacactcttgcctgaaagcttttgcatatatcttttgtattatcttgtgatccggtgtctgcgatgacgatctcatcagcgatgtcttgtacacttgataaacaacgggagatgtatctctcctcgtttttcacaatcatgcaaagagtcagtttacattcagcatttccgctcattttctcacctttcccgattttggagttgttgattgaaccaaggccgttcaggagtgccgttcatcgtgatgatgacaggccgcacccatctgacggcaggttcggcagtttccgtattccattcctgaagctgcctgacagcccgcttcgtaatcggatgcgcccggaattcgcgcgggctttcagaaatgaattttttcgttcgttccgtaactgtcttcatttcaagaaagtgccgctcatacatctgcttctgctcttcttccaagctgatcattaaaaacagacggccgcctgtttccatctgccagcggcacaatgcggagaacagcctgatttcttctttgtaatttgaaccccttcttttatccacggtcacagataatatatgtaacagcgcaatcgtgagacaatgcatggcttcaaaagatgcctgtttcgcttttgagatgcttggatacggcatatgcttcacccgtctctttttttatgaacgctccccgccttttttcttccaaccgcagtcctcacaatccccgcactcacagcagccaatgcggccgtaaaacaggccgtcacacggatcttccggatcactgggatcgtctggattccacgggtcatcaggatcgcccggatcactcggattgctcgggtcgtccggattccacgggtcatcaggatcgcccggatcactcggattacttggatcatccggattccacgggtcatcaggatcgcccggattactcggattgcttgggtcgtcctggtccatacaggcttcagaatcctgtaagaagataatgtcctcaagcttcgtctgcaaaaggagttgtgatttcatgacggtgcgcaggagccgttcagtgcttctattgattgatgacaattcctccaaggagggatcgccggaagcgccgagaaacatttgaatcctttccgcttccgcctgcagaatatgggatagtccgatttcttccatagccacggatgaaagaaggaggttcagggtctcacatctggagagtgtaatgtcgggggtgatgttcggtatgtttggaagagacatcgatttctccctcttttctcttggtgttattatgcaaaagtgctatatcgtattcttattccgggagagaagagatcattactgatgttttcgttaataaaatatcccggatataaaatccgggatattcgttcggttatttattttaattcaagtttgacgtctacatttcctcttgttgcttttgaatacggacagaactcgtgagcggcatgcactagcttctccgccgtttctttgtcaagatcttttgtatcaatgacgagcgttacgccgattttgtaacctccgtcactctcatcttttaaaaggctgacctgtccttcaatttcagaggtcatgtcgattttttgtttttgggcggcgagctcaagcgctcccccgaagcaggcagcatatcctgccgcaaagagctgttcagggtttgtgccggtttctccgtctttttttgcattcggcatgatgatgtcaaaatccagcaccccgtcttcggatttaatatgtcctgctcgtccgccgactgcggtcgcttttgaagtaaataatgccattattatcagcctcctcattgtacttactgtatatattgcccctgctcatatttttaaacatgaggaataggaaatgggccgtttttcggctacaataggggtaacgttaacaaacaaagagttggtgaaagaagtaatggcagaaaaagattttgaacatatgaaactggagaatcagctttgttttttgctgtacgcaagctcaagggaaatgacgaaacggtacaaaccgctgcttgataagctcaacgtaacttatccccaatatttggcgctgcttttattatgggagcacgaagaactgaatgtgaaacggatgggtgagcttttgtacctggattccggaacgctgacaccgatgctgaaacggatggagcagcacggaatcatcatgagaaagcggtcggctgtagacgagcgatccgtgacgatcaggctcacagatgaaggacgggccttgcagaagacagcggcggatatccccattgccatgctggaacagacgggacggtcaaaagaggaattaaagcagttaaaacagtcgctttatgaggttttgaatacgctgcacggcaaaaaataaggatgccccgaatgggcatccttatttttattctgctgccagaagcttcacttcaatatttcccgctgtcgcttttgaatacgggcagacaccgtgcgctttttggataagggcttcaagctcctgtttatcaatgccggatgctttgacctcaagcgtaacgcctagtttatatccttggtctgcttcatctttcagcagactgacatgcgcagtgacctctgtttcaatactcagacgctcttttctcgctacgagctgaagagcgctgtcaaagcaggctgaatatcctgcggcaaacagctgttcagggtttgtggcatgttcgagcttttttgctcttggcgttcccggcatagcaacatcaagattcagcactccgtcagaagacgtgactttcccttcacgtccgccggcggctgatacggttgcagtaaataatggttttgtcatgtgaattcacctctattatattgtgtacaatttaattttacacaatataataagaaccgtcaatctttccgcataaaaaaagcctaccctttttgaaggataagcttaaaagattatacgcggatttgtccgtttcctttgatgatgatttttgtagatgttaacgccggaagccccatcggccctctcgcgtgaagcttttgcgtgctgatgccgatttcggctccgtatccgaattcaaagccgtccgtaaaccgggttgaagcattatgatacacggcggcggcgtcaacggcggtctggaagtaagccgcatgctcggcgttctccgtcagaatggcttctgaatggtttgtgccgtactgctgaatgtggcggaccgcctcctgtacgtcctgcaccgttttcacactgagaatcggcgccaggtactccgctccccaatcggcttcttctgcttgtttcgcttgaggctccagtttgcaaattacctggtctcctcggagctccacccctttttctgtcagctgattcagcagctttcgtccgtgttcttcggcccatttttcatgaatcaaaagagattcaatcgcgttgcagaccgaaggacgctgtgttttggcattgatgacgacctcgcttgccatttgaggatctgctgactcatctatgtacacgtggcaattgcccgctccggtttctaaaacgggtacggttgattccctgaccactagatcaattaaatttttaccgccgcgcgggatcaatacatccagcccgtcatttaatgtaaagagctgtttggcggtttctttgcttgtatcttctatgagctgaacggcatcaatcggaagctttgacagccccagtgcgcgtttcatcacactgacaagcgctatgttgctgtggatggcggaagaacttcctctgagcacaaccgcgtttccggttttcaggcagagtgtggccgcgtctacggtaacgttcggtctggcctcatagatcatgcccactactccaaggggcacgcggattttttcaatggataatccattctctttttgaatggtctccagcgattcaccgacgggatcttcaagaccgattaatagttccacggcgtccgcgatatcgagcaggcgtttttcatcaagagtcagcctgtcaataatgtcaggtgtcagtcctctgttccgtcccgcttcaatatctttctgattctctgttaaaatcagccggcgttcgtttctgagtccgtctgcaatacattgaagcgcttcgtttttttcagccgtcgttttcatgaccatttcggcagccgcttcttttgccaaggctgctttttgcaatacttcactcatttgtgttccccctcgtcaaataaattcacccaatcatctctgtgaatcacttccacctgcttcgttcctgaaagctggtcgctccgcttccctttggcttctaaaatttcatcggatgagtactgcgtctgccctttgccgataatgccgccgggccctttgacttccactacggcccctttcggaaaactgccgcagacatcagcgacgccggccgggaggagacttgacccgttatggatcatcgcctgctccgctcccccatcaatgatgatttcccctgatatcggagaatgaaacatgatccattgccgtgtattatttactgaggacaggtctttatcgccgatataagtgccgtcgccttttccgtctaaaattcccatcagtttttcccgtccggagccggttccgataaataccttcaccccgagcgacaatgcggtctgggcggcgagaagttttgacttcatgcctccggtgccgacctttgagcctgctgatccggcatatccgagcaattctggtgtgatgtcattcagatagtcgaaccgctttgcgtccgggttttcaatcggattggcatcgtacagcccgttaatgtctgtgagaatcattaattggtctgcatgaatcaaaccgcttacaagcgccgacagcatgtcgttatcaccgaacgtcagctcttcgactgatgtggaatcattctcattaataatcggcacgacgccacgctccaacagttccattacagtggcataggcatttctgtaccgctctctttttgagaaatcatttcttgttaataaaatttgtgccggcgtcagaccgtatctttttaaatggtccatatattgctgcattaaaagcgtctggccgactgcggcagatgcctgctttccttttatcgtaacgggtcgcgacggatagccgagagcggaaaaacccgctgccaccgcgcctgaggtaatgaggatcacttcatgcccgttttcttttaataaagaaatggcttccgtatgttccttgatttttgcttcatcaatgcttccgttactgttggtgagcgagctgctcccgattttcacaacaattctttgttttttcatcgtttctcctccgtggcaatcaatccaaaccggctctcttcaataaaaaaagcccattccgtcctgaaaaataaggacgaaatgggctttccgtggtaccaccttgtttgaacgcgtttttcacgcgtcccgctttcctgtaacgccaggttatcgcgcctgagttttcccctcaggactccaaggcaggttcggcaggtttcatgcggcaaaatgtttcagcgggccattttgctctctgtcacagaaagttctgcgtactgatcctcttcaacgctcaatgatttttttatattatgcaaagaaaacaggttcttgtcaagacattttcatccataaaaaacagtccgcctccccggcggaccgccattaattaaatacgatcgttttgtttccgtgaacgatgacgcggtcttccagatgccattttacggctcttgccaacacgctccgctcaatcgttctgccgatattcttcagatcctctgcgtgatctctgtgatcgacgcgttcaatatcctgttcaataataggcccttcatcaagatcgtccgtcacatagtgagaggtcgcgccgattaatttcactccgcgctcataagcccgtttatacgggttagcgccgataaaggccggcagaaatgaatggtggatgttaataatccgattcggatgggcagatacaaaatcagacgtcaaaatctgcatgtagcgggcaagaacgatcacatcaatcttataccgctccagcagctcaagctggcgccgctccacttcggcgcggatgtctttgttagctttcatgtaatggaacggaatattcagcggttcgaccacttctttggcctcttcgtggttgctgatgacgaccgcaatttcggccatcatattgccgctttgccattcccaaatcagttcatgaaggcagtgcagctccttcgatacaaagatcgccacccgcttcagctcacttgccagagacaggctccatgtcatgccgaatgtctgggcgattgaggcgaacgcctgctgtaagtcctcttttttctcacgaatgcccttgcagtcgaattcgatcctaagaaaaaaccgtccgccttcagggtcagtcgtgtattgatttgattcaataatgtttgcaccatgttcaaacaaaaacgccgacacggccgatacaattcccggctggtcggggcagctgacaagcaggcgccctttttcctcattcccgcggcggtattctttcagccgctgtgtcatatatgaattcatctgttttaatccctcgtatcttcataattcgtaacttactaataaattatactgaagatttgataaaaatcaatttacgaaagaattttcagccctacggcagcgcataaaataagcgcaatgaaaaagatgcgcttcgcatccttctgctcgccgtagaaaagaatgccggctaatgcgccgcccgccgtgccgataccggtccagatcgcataggccgtgcccatcgcgatcgtctccatcgcataagaaagcagggaaaaagaggccgcaaatccggcgataatgaaaagaatccattggactttcttttctttttgaaattgattcattaaaatgaccccgagcatttcacaaagacccgcggctatcaggctgatccaatgcattacgccttctcctccttcgtctcaggcttatcctgtgtgaccagctttaatccgatgacaccgatcagcaaaacgccgatcagcacgattttcaccggatcggcctgctctttgaaaagcaggatttcactgagcacggtgcccgctgtcccgagtccggtaaagaccgcatataccgttcctacgggcaggctgtctgtcgccttgattaatagataaaaactgatgatgattcccgtaatcgtgccgctccacgccagtgccgaatcagcatgtttcaggccggtgacccataccacttcaaatacggccgctatgaccactaaaccccatttcatgttcttcaccctttctgtatccggacaatacaaaaaagcccggatagtcgtctcacatgagattgactctcccgggcttttttccctccgtgtgcatatgcgggatatgtccgcatatgtgttttctctcggaccaggccatgtatgaacatgcggaaccctagaaaacatgtctgttcgtatcatactacatttcgccgaaacgttcaacgtcagatgtgatgtcaaaaaccgtcagctgcctctcccatttggtaacggtctcaccgggcaccataccgattttttccgcgacacggacggaggcagcgttttccggatcaatcagcgccgctatgcgtccgtattgctgcgtatgaaaaccgtagtccagacaggcgttcgccgcctctgtcgcatagccgcagccccagcggcggcgggcaaacatatagccgatttccatcaaagtgtttccgtttaccgtctgcggaacgattccgcattgaccgagaaatgcgcccgtctctttatcctctgcgatccaaagactgacgccgtatcctgcggccaatcgtttgttccaggcaatccattccttcgtttcccgtctgcttttaagagaaggataatatttcatgacctctctgtcggtaaacagcccgtacaaattttcttcatcgtcatcccgcatagtccgcagacggatacgcccggttgtcaggatggtgccggaagacttatgtttcatcatgcacgccacgtctcctttccctgtaatagattatggatccggcaggaaaagtcctttctcagcataaaaaaaccgctttttaaaaaagcggtttgatgattaccaaggtttatctgttccgagcgcctcggccagggccttgctgtgttttaagcggttttttcgttctccggcgcgctgaacggccgtattgtgaagcatgatttcttcctcggtttccggcacgatccgcggaacgggtaccgatttcccgtttgaatcaagcgcgacaaaggtcagaaacgacgttgccgcaagctcgcgttcgcccgtcatcagatgttctttaatgactttgacaaacacctccatagacgatgtgccgacccatgtgacgtaagattcaaggcatacggaatcctgttggccgatggggcgcaaaaaatctacagaatccattgaggccgtgactgtttcacaccggcagtggcgggccgcggaaattgaagcgatatcatcaatgtagctcatcagctttccgccaaacagcgtattgtgattattcgtatcaagcggaaaaaccctgcttgttttaacaacccttgtttctttgcaaaatcttgattctggcaacttcatattatttaaactcccctttggtgtctggtcgttttgactcattcatctgtaccctattaaacaatactttgaccgttttgtctaaaattttaaatattaagttggttagatattctctcataaatgtttcattattcatcacatccgggaataataaacgcaaaataccgataggaggatatcacatggacgtatccattcccaaatccacgcggaaatcggcttgccgcagtgagtttgatgctttgcagacagtcatcttatgccggccggaacacatggccatcaaggatattattaacggaacgcagaaacatttcaaacaagaaaatattaacatacccgttgccctcaaacagcatagtgagtttattgacattttaagatctcatcagattgaagtcgtcctgctgcctgccgatcccgcattgcctgagcaggtattcacccgggatatcggatttgtcttaggcgagacggcgtttatttcaaacatggcggcttcagtccggcagggagaagaaaaagtgtttcaaaacctgcttgacaataagaaaatcccctatacgcgactgaaaaaagcgaacattgaaggcggcgacatcttgatcgcagacggcaccgtttacgccgggctgagcaagcgcacggataaagcggctgtccgggagctgcaggaggcgctgccggagatgacggttgtgccgatccctctcaaggaggatttcttacatttggactgtgtatttaatatgatctcagaaacggaggcgctatactgcaaaaatggcttgcggcagaaagaaattgatcttctcgccgaacgttttgagatgatagaagtgcctgaagaagagcaattcacgctcggtcctaatatcttgtcaatcggcaatcagacaattatcagcctgccgcagcaccgtcatacgaaccgcgagctcagaaaaagaggttatacagtcattgaaaccgagttttccgaaattattaaatcaggcggttccttccgctgctgcaccttgccgcttgtcagaacatcttaaacatttacaaggcagtttccttcaagatacgttaatatagagaagacaagactctaaagggggaaaccgaatggctaagtacataggatacgcgggaacatatacaaaaggcggaagcgaaggcatttattgttttgaacttgatacagaagcgaaacggctcagccgtccgaagctggcagcaaagctcggcaacccgacatacgtcactccgaattctgataacagcatgctgtattccattgaaaaggcagacggaaaaggcggcgtcgcagcctatcagattcatcagaacagcgggaaattaacttttgtgaaccaccagctgattgaaggcccgtctccatgccacgtcagcattgatgataaacatgaatatgtgttaaccgctaattaccacagcggaaaagtgcacgcctttcccgtcaatgaagacggaagtctgcgggagccggctgccgaagccgctcatacgggaacaggtcctcatgaaagacaagagaaaccgcatacccatttcgcaggctatacacctgagcataactacattgcagccgtcgatttagggacggatacgctttatacttaccaaatgaaaaacggttcgctcacagaggtgaaaactcactctttcgcaccgggttcagggccgcgccacatcgttttccatccggcggaaaaatacgcctatgtcatgacggaaatcagtaatgaagtcatcgcgcttgaatacaacccgaccttaggtgaattcagagagctgcaggtcatttccgctttgcctgaaggctttacggacaaatcgcaaggcagcgcgatccgcatatctaaagacggcagatttctttatgccgccaaccgcggacatgacagcatcgccatctttaagatcaaccaatattccggcgaattgtctcttattgaatgggtgccgacagaaggaaactggccgcgtgatttcgcgtttgacccttccgagacattccttgtcgcgtcaaacgaagaaacgggaaatctggttttgtttgaacgtgatacggaaacgggcaaattgactctgcttcaatctgacattccggttccgtatccggtctgcgtgtcatttctgcatcaggtttaattaaaaaagaaagctgactttatattgtcagctttcttttttgtataaatggcaggcgacaaaacgccccgccttcacttcttcaagctcaggcgttatcttaccgcagagctccatcgcttcaggacaccgcgtcctgaatacacagccgctcggcgggttaagggggctcggcagctcccctttcagaataatccgttcacgcttgtcctcaagaagcgggtcaggaatcgggattgaggataaaagcgccttcgtatatgggtgaagcggttcccggtaaagcgcagcgctttctgtaatttccatcatgcggcccaaatacatcacgccgatccggtcgctgatatgcttgaccattgataaatcgtgggcgataaataaaaatgtcagccctttctctttctgaagcctttttaaaaggttgacgacctgagcctgtaccgacacatccagcgcggaaatcggctcatccgccacgataaattcgggatgcagagagagcgctctggcaatcccgattctctgcctctgtccgccgctgaattcgtggggataccggctgccgaaatccggatggagcccgacagcttcaagcagttcatccgccatcatcagacgggcttttcttgtattgtaaagattgtggatttccatcggctccataataatttcccttacggtcaggcgcggatttaacgaggcgtaagggtcctggaaaatcatctgcagcttgcggaagaagaccgaccgctgttctgccgcggcacggtgtatatccgtcccttcatatgataccgaaccggccgtcgggtcatacagacggagaataacccttccgagcgtcgatttaccgcatcccgattctccgacaagtccgaatgtttcccctctgttaatgtgaaagctgacaccgtcgactgcttttacggctttctttcttcctgcgtcaaaatgcattttcagcccgctgacttcaaggagcggagatgccgtcattttctattcccccttttcgcttatacagcggcgtacggtgcataattctttttcatagacggttccttccaaagacagcacttcgattgtttttcccgttttcggggagtgcagcattcggccgtctcccagcgccaaaccgacatggtggatcgcgccttttccttcttcataggcgaaaaacaaaaggtcagccggcaggatatcgtttaccgccgcgccgcatccggcttttgcttggtcagttgcatcacggggaagggtatagccgtttgctttaaatatcgaatacataaacccggaacagtcaaacccgaaaccgctcagtcctccccataaatacggaagcccgagaaacatcatgcccgtttcgatgacatcggccgcccgtccttccgtatgccggcactcgtctgcgtcagcttcatttacgaacctttctccgagcggcgtcaccacccggaaaaagcctttctcacgtcctgatgccggaagacgcgttaagaaacttacttccaagtccggttcgccatttgtgtgatataaaaaagctgtcggtttggtaatccatacggcgggggaagatgtatgaaagccgtcttttgaaagctggctttttttcatccaccccggatatccgcgcacatccttgtttgaaggctggccgggaacggcgacaaaagtccattccccttcctctttgagaatgatcacctcttccccgaaaagcgcttgcgtttggacaaggttgtctgtgcataattgcagccgctcttcatatcccatagacgctaaccattttctgatctgcggcgggttttcaagcatcggcgcatcatacgaacggggagatgacggcagcgtccatacgttggctgccgccgctgtaacggctgctctcatcttttcgccccctcttgtatcgacacaccggtaatgccgagacccggttcgtcgggaatcgcaatctgactgccgctgtatgtgatgccgccttgaatcaaatcatctttcagcataagcggcgcatcaaaatcaaacctcgtcacattccgtttgcccgcggcaaaatgggccgcggcggtgatgccgagtttggtctcaatcatgctgccgaccatgcactccacgccgcacgtttccgccatcgcattgattgtttccgcctgctttatgccgcccgctttcatcagcttaatattaattaaatcggcgcttctcgtctgcagcacgtgaaaggcctgacggggggtaaagacgctctcatccgccataatcggcgtgtctacggcatcggtgacctgcttcagcccggcgatatcgtctttgtgaacaggctgctcgacaagctcaatgcccagtccggcgtcttccatctttcggatcgcagtcacggcttctttcgaagtccagccttggttggcgtccaatctcagtttgacgtttccgccgacacgtgatctgatcgcctgaatccgggcaacatcgtctgatatgtcacctatgccgacttttatttttaaaatatgaaatcctttgttcacataacggtctgcatcccccgccatctcctcaggagagttaacgctgacggtaaaatctgtttccagtgtattccgatagccgccgagaagccggtaaagcggctgtccgtgcatttgcgcccatccgtcatatacagccatatccaccgcggcttttgcgctttgatttctttccaacagccggctgatatcaaacaaaacggcttccatgccggaaatgccccgccccaagagagcgggcttcagcacatcgtggacggcgctttcaataccgtccgcgctgtcgcctgtaatgacaaccgtcggcggcgcctccccccagccggtcagaccgttgtcaaaagtgagcttcacaatgaccgattcagcattgtaaaccgtgcgtaaagcggtcttaaacggctttttcagcggcacggacatccgtcccgtttgaatatctgtaatcctcacgcctgatcactcccttccggaaacccccgattcaatcgttaccgctttggccgccgtatccataaccgcgcgggctccgatcggaacggcgaagctcggtgaacaatggccgattttaaagcctttgagcgcgggcttccctgatttgacaatgtaatcgttcagcacttgctctaaagtaagcgacttttctttatgcttcggttcgcattggtgaaaatcacagaccaggattccggctgcgtctgacagttttccggccatctttaattgattcagcattctgtcgatttgatacggctcctcatcaatatcctcgataaacagcaatttgtcttttgtatcaatttcaaatggcgtgccgagtgtggacgtaatgagcgacaagttgcctcccgcaagctctccctcggcccttccgcctgtcagcacctctaagggagagatgtcctccgtataggtgaattccgtttctgtaaaaagctgatgatacgacgcttttgtcaggggatcagcatcttcaagcccgacatccgtgctcagcatcgggccgtgaaatgtgacgagccccgtattttgatgaatggcggtatgtaaaaacgtgatatcactgtatccccagaaaattttcggattgcggcggattaagccgaaatcgatgtcggcggcaatgcggcccgtgccgaatcctccgcacgcgcatatcaccgctttgacattctgatcactaaacatgtcatggagatcatcgaggcgcgcccggtcctctcccgccaaatagccgtgacgggtcttcagcgcccggccgagtttcacttgaaggccaagctcattctctaaaaacagcagcgcggtttgcagcgtcccgctctcaggcgggcttgcgggcgcaatcacaccgaccgtgtcgcctttttgcagtgctttcggtttatggttcatgactttttcaatctcctttccggattgaaaagtgaaacacgccgctcctttatcggcaaaagagcggcgtatgtttccgctgtaagatcaggacttttccgcccacttcagatcaatgtaaccgacggggtgccggacaatgcccttcacgccgctgttctgcagatgcacctgattgtaaaagtaaatcggaatgatcggagcctcgttcatgagcagtttttccgctttatgcatgagcgcaaaacgttttttggcatcggcttcctgttttgcctgcttgatgtagccgtcgtatgccgcgctgccccagccggtgcggttcatggaattatccgtctggaaagcctctagaaaactgatcggatctgcgtaatccggtaaaaatgagctttgagagaactggaacttcagtcctttctgctcttctaaaaagacgttccattccatattggcgagcttaacgtctataccgagcacacttttgagcttctgctgaatcgcttccgctattttcttatgctccggttttgtgctgtatgtcaatgtaacggcgggcagcttgtcataatgctcttctgccatgcctttttccagcagttttttggcttctgattcatccggatttaataaactgccgcccgcttcgcggaaatctttcccgtcaggctgagtaaatcccggggacacaaaggcatgtgccggcttttcactgtttttggtcacataatccgtgatttctttctgatcaatcgctgccgcgaacgcttttctgatcttttcattttgaaacggctccatttttacgttaaaacgatagaaatagagtccggcctgatcccacgtgcggacatttttccctcccatcagctgctcgctcagctctgccggcacaaaggcggtatccaaatcccccgactggaacatctgataatcggtattccggtcactgaccatcgcccatgtgactttatccagttttactgtctttttatcccaatacgtctcgtttttgaccatcgtcatgctgtcgtcatgcttccattccgtcagtttgaacggcccgttgccgacaaaggtttttgcttcagtgaaccatttcggatcagccttggcgaccttctcattaatcgggaaatacgccggattggacacgacgctcagaaaataatcctgcggtgccgccagtgtgacgacaagcgtttttttatcttttgccgtgactttcacgtcttcttgtttgccttttccgctgttaaattcttccccgcctttgatcatatagccgagaaaagcggaagatgcgcccgttttcggatcgagcatccgtttccaggcgtacacgaagtcttccgccgtaacgggatcgccatttgtccattcggcgttatcccggatattgaaggtatatgtcagcttatcagcggacaccttccagctttccgccatggccggttcgggcttattatcttttccgagcctcgtcaatccttccatgatgttattcagcggctgccaggaaacattattaaatccgatcggcggatcaagtgaggtcggctcattttcgttattgagccgcagcaccgtttcacccccctgttcttttgctttgccgggttctgtccccgcctgttcattggctgtacagcccatcagagcaaacgaaacaacagcaatcacaccgatcgcccatctctttttcatttcaatccccctttttcctctgctgccgtcagctgctgcttcagccgctctgcacggtgatcctgaagccagcagttgacgatatggcttttggatttcacggttgttgccgggtataccttttcacagacgatcatcctgtccgggcagcgggcggcaaacgggcagcccggcggcggatcgaataaatcaggcggcgtcccgtcaatcggcgacagctcactatcctccatatccagccgcggcactgaacgaagcagcccctttgtgtatggatgagccggacggtaaaaaatatcatgcctcgtgccgatttcggcgattttccccgcatacatgacggcgactctgtcggcggtctgagcgacgacgccgagatcgtgtgtgatcagaataatagacacgcctgtttttctttgaatcttcttaaataattcaaggatttgtgcttgaatcgttacatcaagagccgttgtcggttcatcggcgatcataatttccggctcgcagatcagagccatcgcaatcacgatccgctgccgcatgcccccgcttaattggtgggggtactgcttcaggcgggatttcgagtccgggataccgaccagatccagcatggcgagaacttcggattcagcttgttttcttgccatggcgcggtgttccaacagcgcttctgagagctgattccctatggtcaaagtcggattgagcgccgtcatcgggtcctgaaagatcatagaaatatcgcgcccccggattccccgcatttcccgatccgacatttggcaaaggtctttctgtttaaattgtatgcttccggattcaatctttgccgaatgtttcggaagaagacccatcacggcttgtgacgtcacgctttttccgcagcccgattcaccgacgatcgcaaacgtttcacctttatataaatcgaagctgacgcctctgacggcttttacagtgcctccgtatgttgaaaaagtaacatgcagattttgaacggaaagaacttgctgcgccatttttcctacctcctcagtttcgggtctaacgcgtcctgcaagccgtctccaagtacgttaaacgcgtacatcgtcaaggaaatgaaaaaagcggggaaaaacagccgccaccaatggcctgataaaatcgccggcagcccgtcgtttgccatgactccccagcttgcaaacggcgcctgaatgccgagtccgagaaaacttaaaaatgattccgcaaaaatcgccgccggcaccgtaagcgtcatttggacaataatggctcccatcgtattcggcagcagatttttcttaatgatccgaaatgttttcgctccaaacgttttcgaagccaatacgtgttcatcatgcttcatcctcagcacctgccctctgacaatccgcgccatgccgacccatcccgtcacggtcagagcgacgataatggaactgagccccggccccatcagcaccattaacaaaatgacaacgagcagatacggcaatccgtagagaacctcgatgattctcatcatagcgctgtctgtccggccccctttgtagccggcgacgcctccgtagatgacgccgatcaaaaagtcgatcagcgccgccatcacaccgacaaataaagagatcctcgctccgtaccacgttcttgtaaacacgtcccggccaagttcatcggttccgaaccagtgtgaaaaagacggcggaagattctgctcggcgagcgtctgccttgtcacgctgtgcggtgatatcagcggaccgaacgcagccgatagaaacaggcagcataatatcacaagcccggccatcgccaatttgttctttttaagccgccgccacgcatcctgactgtaagacaggctcggacgcttgaccgactcggtttcaccctttctttccgcgcccggctgaaaccagtcatcaggcacttctgtgtgttttaccgtttcttgcgggagattcatcaggatcaccctttcttatgaagttttatgcgcgggtctaacaggccgtatgccaaatcaaccagaaacagcaggacgatcagaatcacactgtaaaatacggtcgttcccatgatgaccgggtaatcacgctgattgatgctttctacgaaatatttgcccattcccggtatggcaaaaattttctcgatgacgaaactgcccgttaaaatacttgcggcaagcgtcccgagtactgtcacaacaggcataagagcatttttcaatgcgtgtttgatcacaattttgacgggagaaagcccctttgcttttgccgtgcggatgtaatcctgagtcagcacttcggccatgcttgatcttgtcagcctcgcgataatggccatgggaccgacggcaagcgcaacagtcggcaggaccatgtgaacgggactcgtccaggtagctgccggaaaccatttcagatgaaccgcaaattgctgaatcagcagcgtagccataataaaatttggaatggaaatcccgagcaccgcaaggctcatggccgcataatcgagaaagccgccgcgcctgagagcggccattatgccgagcgcgagtccggaaataacagcgatgatgatcgccgttatcccaagctcaaatgagaccggaaacccgcgttcaagcatagcgtttacactgtctgacggttttttaattgaaggaccgaaatcaaaggtaagaatggattttagatagatggcgtattgagtgataagaggttcgttcagatggtagtaggattcgagatttcgctggaccgcttcgtttgtgccccgctcttcgttaaaaggcgagccggggattactttcatcatgacaaatgtcagagtggtaatgacgaggacggtcataatcatggcgataaaacgtttaataaaataccgcagcaatgccgttcacccctttaacagaatgttgttctcatggcgagttctgtcatgacgagcatggcctgataggcttccggcatgtcttttgcctgaaattgaacgattgtcgttcccgggatgatttctgtgcccggcattaaatgggcccattcagcctgtccgtagttggcaaattcaatgcctaatacaggtctttcaggcggagtcagcggtttgaccttatctttatttttgagcgcataggctgttttttccgtcaggagccgtccggctttttgaggggacaggcatttgaccgcagttcttgaaatggtttgtttgacggcggcagtcgtcacattcgggatcagctcctccgcttcttttgcggcgcaatcatctccggcagccatgatgacagggacatcgtaaaatccggcgagataggcatttaaccccagttcaccgaccggcttatcatttatgtaaaagtggcggacgccgaatatcatgctgtgcgacatcacgcccggcatcgacgctctcgcatgatagccgataaacatcacgcccgaatacgattcatcaagcccctgcatcatggaaaacggcttgacatcccccgtaatcagctctgcctcagggtgaagtttttccgcgagcagattattcatctttgagtggctgtcattcacggtcacttccgtgcatccgttattaaacgcttctgcgatgcaccagtttgcttcttcggtcatcagaaccctgccgcgctcataattgtgcatgcgggaattgacaaatgtttcatcaggcagtccggaaatcccttccatatccacagatagatacagtttcatgtaatgcctccttttttacttaaaatttcgatattaaattatgaatattctaacaaattatattaaaaaaggatgaaacatgcaatataccattctgccattatgggaaaaaacaaacccttttcaccgggaaaagggtttgctgatagaaatagttacatactgtttttgcttatatgatgacgctgaaactgtctgaccgcacttctgtattcatgatcgggaatgacctgatgcctgatcggttcaggagcctgcggcgaagactgttcagccgcctgcttacggacggcatgcggtttatgcgccagcttatgtcccatgccggtcgcattcatgacaaatgataaacacactaaaagcaagcttaagatgaaagcaataagaaacaaatcgctgtatgtccccatcagcaggtcatgcggcgattgtgtgccgcgcgcgccccgaagcgtgccggaagcatctcttttcgtaaaataccctattaaaacaggtgcgcccatataaatgaaaagcctcaaaaactgaactgccgtcatgcgtttcaccagttccggaagcggtccgcccaacgcggctcccatcagtccggctgccacaataagccctgtcccggccgccagcatcacgaaaagccccgcaaatagaataagcggtatatgatgatctgccgtcatccattggaaattcacgaacaccagtataacagagcctgttatgccgagcatgcccggaccgactttatcatatgctaatgcactgatgacagcggcgatggccacgcctcccaaaaggctcgcataaaggaatatcagttgagtttgtgacatatgatatgcggtctgaagctccccgtgaaatgcagaaagactgaccgctatggaaatactgcccgcagcgatcatgaaaacacccagaatcggctttggaatcagcataagtttaatcgaaatcagcgcatgttcgtttctgtactgcatgatcagcaagatcagaagaatgacgatgcttcctccaaatcccgccaatgtctgccatgatgaaaagccccatttcggcagatgaataaatgtataggcggtcagcacggctgatacacccgctaacagaaaaccgatgccgtcaaatggagatttttcagcatttttataagcgtcatcccgcagccacatataactgaaaatgaggccgaaaaaagacagcaggccaaaaatgccgaacagccaatgccaatggccggcgcttgccgccgccgtgcctaaaacggttcccataatgacggacccgtaaaatccgccgattaacacaaataatgcgtaattccggcgctcaatcggaaacgaaagcaccagcatcgggatcataatcatcagcatagtgcccgccgcagctccctgtaaaaaacggcccgcggcgagcggataaatatcatttgtcacagcagcaaggagcgctccgatgacacccgcggccatcgaaatcatatagacaggccgggagccgaatctttttcttaaatacggccccgccggcacgaataaggcaaatgccatattaccgataataatcggatgaaaagagtcaaagttttccccgccgaccgtctgccggacaaggctttggacagccgaaagagcggtattcgacatcagccccggcccgaccgccaatacagcgagcagagaaataatccagtgatgtttttctttcatgtgacagctcctttctgactatttgacaaagtgaaaaagctaacagatctcccccattagcttgacagaattttcatatcttttcatgtgaaggattgaacataatatctcatttattatttcaaatccgatggaaattgtcaatataaagcgccgcgcgtccgatttcgtctttttcacaatttcccacaatcttttcattattatcccacactttttgtttaagatggagtcagtaataataggcaaatcatgctatgatgaaatagagaaacggagtgaacatgatggataactatcgtgatgaaaatcggacagaccaaaaagaacaggaagtccttttagtaaaagaaaacccgcagccggccggatattccgcgccggacgaggacaagaaaaaacgaagcttcggctggttcagaccgcttctcggcggagtgatcggcggagggctcgccctcggcatctatacatttacgccgcttggagaccatcagactcaagatacttccaatccggctcccgctcaggaaacgtcatcggtaaccgccaagcagacatcttctgaatcagacagcggcaaatcggcaaacagctcatcggcaaattcaagcagcatttcgaatatggtggaagacatttcaccggcgatcgtcgggatcaccaatctgcagaagcagcaaagcagttccgatttattcggattcggatcaagctcagattcaaactctaattcgtcgggtgatgcggaaacgggatcgggttcaggcgttatttttaagaaagcaaacggcaaagcgtatatcattacgaataaccacgtggtcgaaggcgcctcttcccttaaagtgtcattatttgacggcaccgatgtaacagctaaactcgtcggcagcgactctctgacagacttggccgttttagaaatcagtgataaacacgtgacaaaaacggcaagcttcggcagctcatccgctctcagaacgggtgaatccgtcatcgccatcggtgatccgctcggaaaagacctttcccgcaccgtcacacaaggcatcgtgagcggcttaaacagaaccgtctcgatctctacgtcagccggcgagtcgagcatcaacgtcatccaaaccgatgccgccatcaatcccggaaacagcggcggaccgctcttgaatacagacggcaaaatcatcggcatcaacagcatgaaaatcagcgaaagtgatgtagaaggcatcggctttgccatcccgagcaacgatgtaaaaccgatcgccgaagagcttctcacgaaaggacaggtggagcgcccttatatcggcgtgagcatgatcgacttggaacaagtgccgcaaaactatcaggaaggcacactcgggcttttcggcaaacagctgaataaaggcgtttatattcgagaagtggcgcagggctcacctgctgccaaagccggattaaaagcagaagacatcattatcagcttaaaagggaaagaaaccggcacgggcagcgaacttcgcaatattctctacaagaatacgaaagtcggcagcaccgttgacgtgaagattatcagaaacggcaaggaaatgacgaaaaaaatgaaactgactcaaaaagaagaaacatcttcttaacaaaaatccaaggcagccgccttggattttttatgtatagcggaaactttaggcctggatcagccgtatgacttagtgtacaaaggaggatacttacacatgaaacaaacaggacttttgctggtcgttacaggcctgatcttgctgcagctgagcattcagtttcctcagcaaaacgctgcttggggtatgacgcttggcgcaagcattttactgaacctttcgggaaccggactgatcatgcgctctctgcacacgcagaccggccgcagatgaatgaaaaaagccgcgggacattctgtcatcccgcggcttttatttcacataaaagcaccctgtccgctggccggacagggtgtttcggttaagacatatgctggtcccgataaatcttttcgtttttcatgccgtacgctttttgcacgatatagagcggacggtcttttgcttcgtcataaatccttccgatatattcgccgatcattccaagcattaatagaacgatgccgctgaataacagctgtatcacaatcagagaggaccagcccgtaatggtgctgttcgtaaacagcttcatgtataaaacgataaacatatagagaaaacccgctccggacatgatcattcccgcatagcttgccgccttgagcggtttatgagagaacgttgtgatcccgtccatggaaagcttcagcatttttttaagcgggtatttcgtttcccccgcaagccgctcatcacgttcatattctacagcagtctgcttaaagccgacccagctgacgagtcctctgacaaaaggatttttttcttttaatcttttcatctcatcacagacttttctgtccagcaggcggaaatctccggtgtcgagcggaatatcaatatcagtcacgctccgcagcagccggtaaaacatagaggccgtctgtttcttgaaaaaggtttctccctttcgtttcgttctgacggcgtacaccacatcgtagccttctttccactgctcaatcatatcaaggattaattcaggagggtcctgcaaatcggcgtcaatgacggcgattgcattcccctctgcataatccatacccgctgtgatcgcgatctgatgtccgaagtttctggaaaaatcaataattttcactctcggatcaatcagactgtgctctcttaaaatctcaatactgcggtctttgcttccatcattgacaaagatcaattcataatgctcttttgtttgatccatgacttctttcaggcgctgataggttgtctgaatgacgggttcctcgttataaaccgggacgactattgaatattgaatatgtctgctcatgttttttcctcctattcatcagattgaagttcgtatagtgaaactgactgattcattccgcccggcccgccgctcattcggctgtttttacccacggccttgctgctttttgtatcagccggatcactatttttcgttttctgatctgtgcttgattgccatttatctgaagatactttctttccgtttttctcaacccactgcacaatatcgttatttccgcctttgcccattccggatgttaagaagtattttactttcccttcttttacgagctttttaaattgagtcagcgtaatggccgggtcagacccgctgaaaccgccgatcgccatgaccgcttttttcgttttaataatgtaaggcgccgccgtgttggaatcggttgcagcaaatagatagtccgctccggcgttatgtttctctaaatagttgatcagttttgtattgacagatgcgttatccattcccatgccttttccgcttgttgaagcgagctgagggcctgtttcaggcaatgagctgttgcctccgtacagaagcggtgtgctcgcccaataaatcggcatgaccatcaagacgaaaagggctgcaagtgaaacataataacttagcggtttttggcgctgtttgaatacgaacagggcgattgctgccactgcgccgagaacgcctgctccgatgctccagcctgcgccgatttgatcattgtagtttctgaggataaacagctcaaatccggttgtcacaagaatagcggccggcaatagccaagttttccatcccgcctgcttgcggtacagatgaacgagggcgacccatcccgcaccgacaagtgccgcgatcggaggcgccagcataatgagataataatggtggaaaaattccgccacactgaagaatccggcaatcggcacaagccacgctgcccaaaagatcgtttccttctgttctgctgataatcgtcttctttctctcgccccggcggtcaataaaccggccattccaaaaatcgcaaacggcaggagccagctgatctgatcagataattccgtttggaaaaggcgcagcggaccaggagttcccgttccgaacattcctgaacctgattgcattttcgagccggtgcctgtaccgctttttcctccgccaccgggaccatctccgccgcttgtaggacctccttgaccgccgcttggcattttcccgttagatggaggtgccgtcatactgccgttttgtggtttgtctccgcttgctgaactgctgcttgaagactggccaggcggtttttgcatttgtgaagaaccatcggaagaagacatctctttcgatgcgtttccgtccggcccgccctgaccgccgccggaactttgccctgtcagccgctgaatcccgttatatccgaaagccaattccaatacggagtttgtctggctgcttccgacatatggccttttgccggctggaatattatcaacaatgagcggccatgacaatgaaacggctgctaaaacggctaacgcgcttaccaatgaaatgatttttttcttaatcgtggtgtttgccgcaatcatatagaacagcaagaaggccggcaaaatcatataagcctgaagcatttttgtgttaaagcctgctccgacgacaaaaaatgccgccaaaagccagatcagtctgccttttctgatcgctttaaagagaagccatgtggcgaacaagaggaaaaagaccagtaaagcatcgacattattcgtccgcgcgaccgctactgcgatcggtgtacacgccatgacaaatgaggcgatgcgcgccgccgtttttccgaacgtcggctttattaataagtacatgaatagaactgaacctacacccgccaatgcctgaggcaggatgacgctccacccgtgcataccgaatatcagcgcgctgatcgtttgtatctggtatgtaacaggcggtttatctaccgtgataaacccggctgcgtcaaatgaagcgtaaaagaaattatgaaagctttgaagcatactcgttaccgctgcggtgtaataaggattcaccgtatcgtcattccagatgttgtacatattcaagaatgcggaagcgagtaaaatgagaattaagactgcgtctatctcgcgttttttcattttcacctgtgttttcactccttttgtttaactttgaacaagtgtaacaaccaaatgtgaaaaatttattaataaacaaagacaattattttgccgtttacaaataggtaaaaagaatgacaaaacgggtaaaaaagcaaaaaaaagatgcccccgtcaagccgggaggcatctgtcatgatttctgatttactgtatcggtttcagccgtgcttctatttcagaacggcggtgttcgagataaggcgggagcgcaaccgttttgcctagctcttcaggtttttcatcaaccataaatcccggaccgtctgttgacaattcgaacagaattccgttcggctcccggaagtacagcgctttgaaataataacgctctacaatgcctgagttgctgaaaccttctttcgtaatgatgcggtgccataaagcaagctcctcttcattctgaacgcggaaggccacatggtggacgctgccttttccaggacgctcgcgcggaagatcgtttctttcaatgagatggacttctgtgcgcgcgcctccgtttccggattcgagcaccgtaaccgtgccccggtcttcatgcgtttctttcccgatttcagtgaagcccagcacatcggttaacacacgcagcgtcggttctgcatacgggacggtcaattcaacgggaccaagaccgcggaaagaatattcttccggtatgccgctttgcttcaccgcttcaccgatgtcttttcctttttcgtcagctgtcagcacaagccgctgtccttcatgatcccaaaaagcgagtgtgtccctgcccgctattgtcatgatgtcgccatgagcgacctgatgctcttcaaatcgttttttccaatattgaagcgcttgtgcatccgggacacgcaggccgattgaagaaatactgtttgttcccgcatgaaacggcgcgatccgcggaatctcgaaaaacgtcaattcagatcccggattggctgcttcatcaccgtaaaataagtgatacatcgtcggttcatcttggtttacggactttttcacaagcttcaatcccaggatgttccgatagaaatctaaatttttctgcgcatcagccgtcaatgctgatacatggtgtattccattaactttcattatgttatcctccagtcaattatctcgatttcgagatattttatatatatacaatttatgttatccggatcgcaaagtcaacccatctgcttcacagacggtctgcagactgtcgctctccaaataacgaaccttcgatattaaaaaaccattaatgttcgcttttaaaacagtattttttccttctcaaaagcagaaacctttatcttttagggaaaacaacaaaatcagaaaatttattttattcgtgtttcagcaattagggtttacaatatggaaaatagttttttcagcatgacgattttacatctggagggataggatatgcagattgaagagaacggacttaaaaaagagatcggccttaccatcgccctctcacttgttatcggcaccatcatcggttccggcgtatttatgaaaccaggcgccgtgcttgcctactccggtgatgcgaaaactgcgcttatcgcgtggctgttaggaggcattttgacgcttgccggcggcttgaccgttgcggaaatcggcactcagattccgaaaacgggcggactttatacatatctagaagaagtgtacggcgaattttggggctttttgtgcggatgggttcaaattatcatttacggccccgccattatcggagcaatcggcttgtatttcggctctttgatggcgcacttgttcaattgggattccggctggtctaaattgatcgggatttcagccgttttgtttttaagcatcattaacattatcggaacgaaatatggcggcatcgtccagggaattacgactgtcggcaaattgattccgattatctgcatgatcgtgttcggcctttggaaaggcgatcagcatattttcacagccgttacaagcagcatgtcggacatgaatttcggcgctgccatactggccaccttgtttgcttatgacggctggattctgcttgcggcactcggcggcgaaatgaaaaatccggaaaagctgctcccgagagcgatgacgggcggactgctggtcgtcaccgccatttatcttttcattaactttgcgctgctgcacattcttcctgcgaccgacatcgtcaaactcggtgaaaatgcgaccggcaccgctgccggaatgctatttggcgacatcggaggaaaattgatcagcgtcggaatcatcgtcagcatcttcggctgtttaaacggaaagattctcgcttttccgcgtgtctcatttgcgatggcggaacggaaacagctgccgtttgccggacagatttcgcgggtgcacccgacgttccgcaccccgtggattgccgtgtcatttcagatcgcgctggccattatttttatgatcgccagcaatcccgataagctgtctgaaatctctattttcatgatttatattttttacgtcatggcctttttcgccgtgtttatcctcagaaaaaaaagcggcggaaaaccgcgcgcctacagcgtgcctttgtatccgatcattcctgttttggccatcgcgggttcactgtttgtgctgatcagcacgatcattacagatacactgagctgcgtgctgtccctcttgatcggcctcgccgggctgccgctttatttttggctgaaaaacggcagaaaaaactgacaaaaacggttccttttacgggagccgttttttttctggcaaaatcacgtgcaaaagttgacagcaaattcacatcttttgttatactttttaagcaagatgtctgaattcgaagtatgttacgtttttttggcgaagtgggtaacataagaaaaacaggatgagacacgtttttacgaaaaaatcaagaggcgtttttttcgactttatctgttttttttcgacaaaaggctatataataatttgatgtgtgcattgtctcattcaaacaatggagggtttttaatgataaaaagaaaaaaagataagttctcactccttttaacagaaatcgcaaaaaacatagacgaaaccgcagaatattttgtcaactttaaagtgacgaaccagacgactttaaaggaatttgccgatacgttaaaagagtttgaaacaaaaggagataatcatgttcatgttatgattaaagagctgaacaaagcttttatcactcccattgaacgtgaagacatccttgagctgacaaacagcctcgatgacgtgcttgacggaatcgaacatttttcagcaatgatggagattttctcgatcacttcttccgatgagcatatcgataagttcagcggatacatcagagagtgcgcgaaggaaattttaatcacgattgaacttcttgcagaaaaccgattgaaggacattcaccctcacgccattaaaattaaggaatacgagcacagctgtgataacctgcaccgtaaatcattaaaaaatctgttcggcacagaaaccgatccgattaaagtgattcagtaccgcgaaatttacgaaacgcttgaggaaattgccgactcttgccaaagcgttgccaataaccttgaaaccattattatgaaaaacgcgtaacgaggggttataatggatactctattacttttaacgatattaattgtcatatgcgctttggtatttgacttcattaacggatttcacgataccgcaaacgcaatcgccacctcagtttcgacaaaagcgctgaagccgcggcacgcaatcgttatggccgccatcatgaactttctcggagcgatgacatttaccggtgtggcgaaaaccattacaaaggacattgtgaatccttatacattagacaacgggtcagttgtcattctggcggctttactcgccgcaatcgtctggaacttgatcacatggtatttcggcattccgagcagctcttcacatgcgattatcggagcgatcgccggagcggccattgcagcgtcaggttttgcaacgcttaattataaagggttcattaaaattatcgaagcacttattttatcaccgatcatcgcctttgttctcggctttatcgtatattcgatcgtgaagctgatttttaaagacagcaatctggcgaaaacaaataaacgcttccgcagagtgcagattttgacggctgccattcagtcctatacacacggaacgaacgacgcgcaaaaagcgatgggtatcattacgatggcgcttatgacggccaatttacataaaagtgatgccattcctttttgggtgcagctctcttgtgccctggcaatgggtctcggcacatccatcggcggctggaaaatcattaaaaccgtcggcggaaaaattatgaaaatccgtccggtaaacggcgtatctgccgacttaaccggcgcagccattattttcggggccacgtttattcatctccctgtcagcacgacgcacgtcatttcgtcttccattctcggtgtgggcgcttcccaccgcgtaaaaggcgtaaactggggaacggctaaacggatgctcattacatgggtcatcaccctgccgattgcaggtacactcggcgccatcgcctttttcatcttagatctctttttctaatgacggcatccgcttctttacagaagcggttttttttgtgacaggaaaatgatgtcatgacatagaatgaacatagcagaccatttttcaaattgtgagggatgctcatgcttttgttttttcagatcatggtgtggacgatggcggccgcgctcattttatatgtgtacgcatcctggcggtatgaggcaaaggtaaaagaaaaaatgtttgccatccgtaaaacgtggtatttactatttgtactgggctccatggtctattggacatatgatcctgaatcgctctttgccgcatggagacaatatttgattgttgccgtctgctttgcccttattgatgcgtttatctttttgagcgcgtatatcaaaaagctcgccggcaatgaattagagacggatacgcgggaaattttagaagaaaataacgaaatgcttcactcctatcttgaaaaactgaaaacctatcaatatctgttgaaaaatgaaccgatccatgtatattatggaagtacagaagcttatgcggaaggcatcagcagactgctggccgcttatgccgaaaaaatgaatgtcacggcttccttgtgcgactattccgcacaatcggataaggaccgcttgacggagcatatgcctgatgcggcggacgttcagtcccgtcttaaccgtaaagatgtctactatgatcaaaaaggcaggcttgtgcttattccgtttacagtccagaaccgccattacgtgatcaaactcacgtcggaaaacctgttgacggaattcgattatttgcttttcacatcgctaacgagcatttatgatttaatgctgccaatagaagaggaaggtgacggttaaatggagcaggcatttcaaaacgggcagccggaacaaagagcgaaaccgttcaaaatgtttaaaaaacgttcaatgacaagtatcgcaagttaccaggtcagccctcataccgccagaattttcaaagaaaacgagcggctgattgacaagtataaacaaaaaaaagcttgattacactaaggacaggagacacggctcttgtccttattccttttttccttatctttcatataataaaaccaacaaagagatgcgacaggtgatgatgtgaagaaaattgtcaggcgcgtaaagtttgtggattacggacgcttcgggctttccgcttattcgctgaggatgcgggcgaggaatctcaggctattgaaccggttaaaaaagaaaaaaggctgaatcccgcaatgtgaacgggactcagccttttttgttaaagctgcatcagaattttcgcttttacagcggggccgtagacgccgtcagacgtcagtccgtttacagattggaagcgggccacggcatctgcggttttcggaccgtagataccgtcaattccgttattgacagctcctttttcaggatagaaataaagcgcggcgagcgcgttttgcacctggtataccttttcgccggacgtgtacggctctgtcagctgaatcacctcgtccggaagagaatacagtgcttcaaccggcgggctgacgatcagtacttgtccgactttaatcaggttcgggtcagcgatgttattccatttctgcagatcggccacgctgacgccgaatttccgcgcgatcgctgacagcgtatctcctttttggacggtatacgtctgtctttccccagaaccgattccagctttaaactcatcccatgtatccaacagtcttctcggacaaagctttcctgaccaatgcttgtgcgcaacgacatttgcaagcgggatgccgtgcgaggtcattaatgtgcggatgagccattgggcgtttgccacggcctgtgaaaagttgccgtctgcgttttcacaaatttcaataccgatggatttacggttgccgtccccgtttccgtcaccggcatgccagccgctttcgttcagcggaagatgctgataaatttccgtatcatcgactgtgaaatgccagcttgtcggtgtatcgggatttttcacatagcttgcgtgacttttggcgttagctccgactgcagtattggctgtattgtgcaccgtaatgtaaatcggtgtcattgcatagcctgggcggttattgtttcctgccgggataaaatcctgtgtgatttttaccatattctcatctctcctatttcgataaattgtttatttttaataaagcctgctgttttttcccttttgctgtaacgtaattgtttttaaaccaggcggcggcagtcgttatgattgtaaaaacggccgacccggcggcatacagcgtatctgcaagctggctgacctggtcctcctgaatattcagcggcgatttgccgaacatcagcaaagtttgattcaataaagcaagcaaaagaagcaccgtcctgacgaccgtgcctttgtccgcgaatttcatatcggtttcccccttacttttgcagcagattgtacatgatggcgatggctccgccaatgacgcccgtgcagattgctgtcacgatcgctcctgtaatggtccgcttaatccatgttgtgttttcgtcaattttgttcagtttttcattcagcgtcatgatttgctgatcctgccggtcggatacccgctctaatgcggctacccgctgttcaagcaccttttgttcacctttgatgcctgcgaattctttttgcaccgcttgttcatccagaagcacttccgctcccccctcttacattgttctcacctcccttcggaagcttcattcttacgaaaatgccgtgcctttgacagaaaggctcccgccggaaatgctctggatttccatgacgatttccttaaagccggcaatatcaaatgaccacacttcttctgtgcctgacgtaccggcggctgatgtcccgtcatcagacctgattcctctgatcggcacgttttttcccgagatggatctcccccaaaacgcgacatggcccgactcagccgtgccggtgatttcgacgagaagttttttccaagcgcccgccgagaagatgcttccctcgcccgcctctgctgcattttcatgaaaaatcacgtctgtatatgaaaacgccatatcaccgcccgtaccgacagattggtataaaacaaattcggactgcttttgatttccgttttcaaaacggaaccggtaatatcgttttgtcaggcagacccaccccgaagcggtcagcactccgcctttgactgcgacaaaatgtgaagctgtccacgaattgttatcctcgctctcttcgataaaaagagttccgctgcggtccgaataagcccacccctgtactctgtctattaagacggctcctaaacggtcttgtccgaattggctgtaaacttcaatcgcttctagcggcgtattggtaagaagctctgccactccggacaaatcagcaacaggtgtgacataatcgtttttgttaccgcgataagcttttacggcgccgggtctgccaagttgatcggcgggaaattcaaatgaatgctttttcatcggccgtcctccttttctcatttattaaaaatgacaaataaaaaaagccgtttggcttatgacacagcatttttataattttcgtatgtttcacccgttatttcttgaaattcctcaggcgtgatatacttcgcggccacaccttcagccagatcttcggcagagcagtcatcatagcccatagcttgtttgaccatttctattgaggcccacttataaaacaaagcgtaaacccaaaagttaagtctcttcattttttcattctccttttacgtttaataattctaattttaaagacgctaattgcctgccgagtgactgctgcgcttgttcggctgcttttctggccaatttctcattcgccagctgtccgccgaggcctgcaagctggtttgaatcgggagccgtatctttttttaagctgtctttatatgcttcgccagcggtttccacccattcttgtttctcttcatcaaaaaatgggcgccacatgccttcgccgtttatttccggcggaaagtccgcagcgttaggcggcagcatataatttcctgtctcagaatccggataaagctcaaccggagtgcctgtataaatgttgttattgtcatacggaaatattaatttcatattctcgctcctttacgtgagtgccaaaacaaggtcaatataatagccgttcacattactttctatattggccataattcccgtcagcttcatatctccattagaataaataataaatttgctgtaaccggtggtgccgctggctgcaaccatcgtcacaacgcctttggccggcgcacaagaggatggcacactcccgaataccacttctctgtccgtaagaacgtgtccgttcaggtgaagggtgtttcccactttgcggtattgaagcggcctgtctcctgatttagcgccatttttataaggaacattgatccaaggtacattctcagtatcaagttcagtaatgaggcgacgccagccctgccagcccaagttcaaatccaaatagttcgtgaacatattatttttataatcgacggcaatgacatacccaaacgttccctttccctcactgtcaagagaggtaaaatgaaacatgccgcgggtcgaagcgctgctcggactgtctgccgctttgccggttgaataaaaggtgccgaacgccctgccgtttttaacgattttttcaagaaagttatcatcatcaccaattgtaagaagatagccgccgttatcgtttgttattttcgaaagctgtgccccgttccacatatttttatccgcctgtgtgacatggatgtcttttttattagcgtgagcgtctactagtttttgtacagcttctgtgttgtccaactcaacccaatcactccaaacattatttgccaaagacttacggaatgttctgttgtcatttgtcatggcaagaacatgaccatatgactttccgacactgcaggtccaaaacccgcgtccgcctgcaggaggggtattcgccgcagttttttcatatgagaaataggtcaatgaaggataatttaacaattcagcatgaagatcagttgtgacattaaataacggctggccgtcatcattcgaaattttatttaactgcgcattgttccatttatccttatcagattttgttacgtgaatatctgttttattagcatgtgcatcgacctttgactgcgatccttccactgactcaaactcacgccatgacgtccaagaatccgagcctgagattttattacgcataaactttcggcggcctgacgacgttgagtcgctgctgctataggacgtatattcctgataagcatacgttccgtagttgtgaacaaacaaatacccgttattattcactggcgcgtttaatgcggtcgtgacactgctcatataatataaacctgtatccgttaccgtattaaagtcagcaccgcttcgatactttgccaacccattatcttccgttaatttaaacagctgtcctgcattccatgtatccttctcagctttcgtcacatgccggtccagatcttgattgtgctgatcaaaatctttctttgctgcctgctggacattgtccacgtttccgaggccgatttgcgcctttgtcgttttgtgcgggttgttcatgtcgtttttatgggccgccagatccgtgtgtgcgtcatttatgcctttttcccagcggttgacgtcatcttcgttaatcggatcgtccggaagccagtctgttttttcttcgtaagccatcgttacaccacctcaaaggtaaatcttaaatcaagcgttctgttattgctgagatctaaatttgtttttcgttctgtgatgacgcttcctgtttcgtcaagcatctgcacggtttcaatgtgtttgacgtcttcttccctgcgtgtgagaacggtgactgcggcatcttttacggaaatgtccgcaatcggagtttcttttccgtttaacagcacttttgtgatcctgtttttcagatcggctgcggcacgctgtctgtaagcggctgatatcatggtaagaccacctcgttattgttgagtgtgacggaataaccgaccttcagttcactgacttttcggtatctccgattgttgagaatgacccggtctttgatttccagtgtttcgtttaatgcggctctcagtgtatacgccaaatgagcaggtttgattttttcaagcgtttcaatcagctcgttcatgtgctgcaggtcatcaagcccgatatcggcataaaaacgatactgccccggaaacatccgaacgtaagctgacggatgttttaaaaaacggtttagcgcctgctcgatcgcttgatgtgtgatgggcggaatattcgacatctttgaaatcagcctgagccgtctcatatcctccgtgtcacctgattcccgcggtatttttaatattttttcccagcgttcaagcccccacgtcgccgtcgtgataaagagctgatctgtcaaatcgaaaatatcgttattctgccgctcaaactcgggagcttccgcctcaagcagttgtgccatctcctttaatcgggttaaaaacggcgggaggtacgccatcatctcatcgagtctgctcaaggattgtcacctctttgagtttaggaatttccacgtcactgagcacgaggttttccgccgcaccgttcattttgatatcggcgtagtcactgacggatgccgagttataaacgatgttgttaatttgtgataaacggacggtgttttcttcaaaagccattttcttaaataaattcaggacgcctttttcaatctccgctttcacgtcatcgatcgagctgttcagctcaggcagcacggaagcggagatttcgatttccttccatacggcgctttccaccgttactgccgctccgatcggcgcctgtccttctccctgcccttcgtccggatcaatataatcctttacttttttgatcagaatatctgatgccggttccaaattcgcatttgtgatgacaaccttcaccgttccggctccgttccaaagcggaaagattttcgccctgccgacgccatcaacctcttcggcccattgtttatagtgctgtttatttgcgctgactgcttcccggcggacacgggtaaaatagcgcgcccttaagctgttgtcgtcttcttcctcacggccgggaattaatatatcgcgcacgactgctttctcaagcccgggtatcgtatcaagcggcagcaggttctgccctgaaatgccggcattgcccgcttcaccggctgtttcacattcaagcgttccatcccccgtatattgaaaatacaggttatcaacgaagaaacgggagcctggcggaatggtgatgcccgctgtgaattctccggctctgaccgcttttgtggcaggtgttcgttcaattcccgcttcagcagcccgcctgtccagaaattctccctgagccgtatcggaaaacacgagctccagcacggtatcaagccaaatataagactttgcgagctcagcggccgcaggcgcgagcgcattgtaaatgacgctgccttctctcgtatcaatatctgccgtaatgcgcgccagcattctgtccataatgtcgtcaaacgtctgagcttcaaacatcctcacccagcacctcctctatctcaagcatgccctcatcagtttcaacggtaaaaaagacgatgaaggcatcatcttttttctcaatctcaaaattggtaacggccaaaatacggtcatcatacagcaaggcttcttctatcagtcttggaatctccatttttttataagcatccgtcgtgttctgatctgaaagcacttcctgaagttcgtttccaatatcatggctgaaaaccgaatatgaataccgttctgtgtgaagagcgatatagacgaattgtctgattgcgtccagtccgtttatcagttcattggtaattcggttgttttcaaaatcaattcggtaggtttgtgaagtctcaacggcctcactcgcatcctccaaatcttcaaattcgatttccggtgtcagggccattgcacccgctccttttagatttgttcatgtaaaaaagccctcttcggcagatgaagcggctttaataggctgatattctcgtacatctccgtccggatgccggttaaattttgtccagtacaaagaaagactgtcctcctgttaaggcggcggtcatcacccgatctcccgcctggagctgatcatcttctccggatctcagccgcttcggcacaatgagtgcatcagacggaatcaaaagtttgtcgtgatctttcagtttcagctcgagcggcgaaacggaggtcacttcggccggcatcagctccaccggcgcttcggcgtcaaccgctccgacggctaaatgtttaatggcatcacttaatctcatcaggatgtcccctccggaagtgaatttttctccgtgacgtcaatcgtcatggtatgttttgttccttggaattcatggcggtccgtatctacataataggttttcttcagcccgatttccggaattgagatatagacaggcaatccgctttccaacccgggaataccgatcgcctgtatatttttcagctctttcttaacgccttttttctcagcctgcttcacttttgcgcgctgtttcagctgggcttcgttaatgtcgtcagaaaccgtttcggtatactgcaaaacgccgaatgttttcatgcccgcgctgtctgacgcggaagcctttatcgttttattgtctttttgcagccgcatgacgacacgggttgcggtgtcatcaattgaggtgctgtattgataccctgtgatattaactcctgtttccagcacccatatgtcagacggctccggccattcacgcaagccgagcctgcctttttctgaatagagctgataattgcgccccgtctggctttttgtctgctttaacgcttttagcatcatatcgtaaaggcttgtatcatttttaaaaacgagtgatttaatggtatggcctgtgttggcaatggatgtgacgggaatttgaaaatcgctggcgatccttttcaatatttgatcggcgcgcttgttggaaaacacgtaaacgtcctggtttttcacaagatattggagcatatcgtatgcggtgaaggcgacggtatgctcatcgggcgttcttgcaaaaacaacgccgcggaacagttcttttccgttccatttgaacaaaaccgtatccccctccgatacaccgtaatacgtctggctgccctgctttacgacaatcgtcgcttcgatggagcggggcgcctgatatctgtgtccttccagcgtgacgctttctgtgacaagctcgagccactccgtttcttttatgacaaatagttcaatcatcttttcacccgtttcattgcggtatcttcagcttctgccccgggaagatccaatgccccggctgccggatattccgtttgctgcgcttaatcatggcggttttattcgcgttccagattttccgccactccgtatggtttccgtaaaatttgccggcgatgtcccaaagcgtatccccttttttgacggtatatgttttgggtgaggctttggacgggcgcttcgctttcgtttttttcttttgtttgatttttcttggcgaagcagttttatattctttcagtacgatatcaaaattccagtcgccgatttcattgtcgccttcgctgtaattaaagctttcaatgctgcatgtgacattgatttttgtccctgtaatcaaaaactgaacgggttttttcgctttcatccatgcttcaatgattgaaatggctttttccggcgaagggatgctttgatattcggcaatcgggctgtaccgtttcggaaaaaaagaagagaacgaaatttctttcgctcccggttcttcgataaacgtcacctctccaagtccggtgactttcacggaatcattctgcacgctgtttgcgatatcaatcgcttcagggagaacgggaagccggagcttgtccttcccctgagacagccaaaattcgtaaacagatttagtcaaaagcaacggccccctttgctccggtataaatgtctttttgcagttcatcaatcagcgcctgtttgattttggcggcgaggctgtcggcgtcctgtccgttatggaaatgctgatcgccgctgaattcgattttaatttcttttgttcccgttttttgaacggtttgtccgccgcctttaacggctgcggaaaccgtgccggctgaaagcgccgccggttccgtctgggacggatcggacacttccatgccgagcgcttgagcggcttgttgcagcagataacggccgcggatgccccgctcttcagggatgatccactcccgtttgttcccttcgccgacacgggcgatctgctccttggtaatcagacccccattggcataaccgacgtaagggcctccatgagccatacttttaatcccggggacattgctgatcgagccgtatcggcttttaatatagccgatagcggcagcggcgttgtgaattggatttctgatatcattcatacccggcgctttgtgatcttcaaaggtgcttggaatcgtctgcataagcccctgtgacgggtgtccggctttggcgttgctgtcccatagattaatggaattagggttgccgcctgactcatgctgtgcgatcgtcattaatcccggaagccagctgatcggcgtattggttgctttcattgcggccaaaagccactctttgacgcttcctcccgctgcacccatgccggaaaaggctgctgcaagcgagcctgcctgtttttcggcgtattttttcacgtcaactgagctgagccctttgacgacgccgactgaagcaaagcgcccgaggctcatcatgacacgggaaggagagtgaatatcaagctcttctctgaatgcgtcctcgacttttttggccatatctttggccgcctgtttgacttcgcttccttttgcagtcatccctgatacgaagtgtccgatcaggcctgacccccagccgttcgcggaatctcttgattgcacaaacggtttattgatatgtgtgcttacgtattgcgacgttcccgtatctttcgcattctgtccggccgaatatcctttcaccgttgcggcgccccatgatgacgattgattaaccgccgattgataaggtgttttcacctttgtttttaaaaatgaatcggtgcccgtcggcgaagtattctgacctttggcatagcccgcaacgacttgctttccgtaaccggatgaagacgaaataagggcattgaacggcattccgatgtttttttccttccagccgtccatatccaccgcttttttgctgattccgctgtcaaagccttcagtaaactgtttgccgagtgatgaagccgtcccgccaagtccggatgtctctacagacgctgcggccgacacagatgcagaagaagaaacaccgcccgctcccgccggaacagcagaagactgagccgaagccgcgcccatatcatcgacaacacgcatgccgagcttagacgcagcttgtgaaagcagcatctttccgcgtccgcgattgttgtcaacgggaatgacaaattctttaccggcttcaccgatccaggaaatggtcggctttgtaatgtagccgcccgtggcgtttttgtccgtttttttctttttatctccgccgcctcctgtgacaaagttcattatgcctgaaatcattttgccgccggttttatcccaaatctttttcacccagtcgaatgctgcagaaaaagcatctgatatggctgttcccacttttacaagaggttcttttatatgtttctcaaaccagccgcttaaccctttccatataccctttaccgtatctaaagcagtctggaaagcatctgatattcctttaccgacatttttcaccatgtctttcaccggattccagacagtatccatgaaccagccggaaaccgtactgaaaacggatttaattttatcccaagctcctgtgattttactccaaatggacgtcgccactccgacgacagccgattttacgggcccccacaccgtgctcataaaccagccggatactgtgctgaagacaccttgaatcgtcgtccacgcattcacgatatttgaccagatgctggttgccactccgacgacagccgatgaaaccggcgtccatacattctccatgaaccaggatgacaccgtgctgaaaatcccttgaatcgtcgtccacgcattcacgatatttgaccagatgcttgtcgccactccgacgacagctgatgaaaccggcgtccatacattttccatgaaccaggatgaaacgcttccccaagtatcttgtattgttgtccaagcactttgcgccgctttggaaatatcattccaagcgtctttcaaagcccctgaatcaaaggcctctcccaagctggaaccgcctaaactgccggcgatgccgcctaccgcgccgccgattagcgtgcccactccaggaacaacgcttcctattgccgctccggccgcggctccggcaagaccgccgcctgctgagccgaccttctctcctgcattatctttattgatgccggctaaatcagtaagtgataacaattcacctatgccgggaattcctttagcggcaccttttaaccctttcataccgccttttagcgcctttgaatctcccaagcctttcaaaagcgcgccgatgcctttacctgccccttttgttttcggcgtgtttacggatgcctgtttgctttcctttacggaggaacttcttttcgaggatttattccgctcttcgactttactgcttttgcccctcgtcactccggtacagcagcagcagccccccaaagccccgccggtttttttggctgactttcctgaagattttgacgctgttaccgtgcgctgtgaaccctttgtcagatcaggacgcttcgggccgttggagccgccggcagtaaggccgcccttactcttttcttttttcgtgccgcctcctaataatccgccgatattgagtttgcctaatttttcagcgattcctgaaaatattttttctattaattccccggctttttcgatgattttgtccgggctgaatttctcaaatttcttggcaatcttgctgacaattttatcaacaaatgcctcggctttttcgatgatcgcatcaggactgaatttgccgaactttttatcaatgcctccgaacagtgaggatgtaaactgctccactttttccaaaatcttatccggattgagaaaatcgaatttctcagaaattcggtcaatcgtgtcatttacaaattgttcggcgcgatcgattagcttatcaggactgaatttgccgacaacgtcgtcgactttcttcataaacgaatcagtaaaatgatccagctctttcaatatggcctccggactgaatttgctgacaacgtcatctatctttttcataaatgaatcagtgaatttatccagttctttcaatatggcttccggactgaatttactcacgaccccgtctacttttttcataaacgaatcagcgaatttatccagttctgataatatcgcctcagggctgaacttgctcgcgatttcgtctactttccccatgaatgagctcgtgaacttgtccagttcggctaatatcgttgcagggctgaatttgctcgcgatctcgtccacttttcccatgaatgacgttgtgaacttatccagttcggttaaaatcgttgccgggctgaatttgcttgcgatctcgtccacttttcccataaatgacgttgtgaacttatccagctctgctaaaatcgtctccgggctgaatttgctcgcgatttcgtctacttttcccatgaatgagctcgtgaacttgtccagctctgccaaaatcgtctccgggctgaatttgcttgcgatttcgtctacttttcccatgaatgatgttgtgaacttatccagctctgccaaaatcgtctccgggctgaatttgcttgcgatttcgtctactttccccatgaatgatgtcgtgaacttgtccaattctgctaaaatcgtctccgggctgaatttgctcgcgatttcgtctacttttcccatgaatgagctcgtgaacttgtccaactctgctaaaatcgtctccgggctgaatttgctcgcgatctcgtccacttttcccatgaatgacgttgtgaacttatcgagttctgctaaaatcgtctccgggctgaatttgcttgcgatttcgtccgctttcttcataaagcttgcagcgaatttatccagttccgctatgattgtttccggataaaatttggatgcgatgtcattgacttttttcatgaaggtgtctgcaatggagtcaagcattgaaaaatcgtttttcggcgaagcaggagcagcagatgcagaagcttttccgacgtccggcatattcttttgcattgcagccagctgtgctgtcaccttttcgtttaacgataattgaataacattgttttttcccgtcagcgaatcaatgcccgctgaaattcggccgactgttttcatgacgtgatctatgacgcgtatagtgacagagtacccgttctttaacgcagattgcatatagcgtttgatacgttccatggcaggggtcacttcgtctgacgcataaagtgaaacggtaaatcctttaaaaccggcagccagatcccgcaatctctcaaatgccgctgtcgcgctgtcttttgctcctattttaatggttaaagacgcaggcagacccgctaattgggcttgcaccttttgaatgacggcactggctccgtcttcagctgaaatagagatcatttgtgcgcccagctttcttttcatagagcgctgaatgcggtcaattgttcttaaaactgatttactctctttgcgtatatcaatttcactttggcgttttgtcattttcctgtatttctcaagcgctctgaagccattttggattttccttattttctttgaaacccgatcttccaattcaaaacgggcggtcagctttgccatgatgtcgctccccctttcttcgcttgtttttcaagaatgtccagcttgtaaccgattaaaccgtacaacagcgccttaaaatgtctcggtgcttcatataactctttcagttctgatggagaataatgaagctcatgcatcgcgtaatagagatacacggcttccttattcccatcttttatcagttttttgcttcttgctccagatcttctaattcatcttcaaaaccattgatctcaatcgctttattcagccaatttgcatactcaccgccgactgaaagcacgcgttttgccacctcgaccggatctgccgttttgtaagcgtcgcggagctccttagaccggaaatcagggtaaatcgtagattcaaccgcgatccgcgcatagaagcgctggctgtctaagtcttttacgcggcctctgcccttcacatttttatatgtcgtgctttccttctccagttcatcaatgcgctcagtcgtaatggctttaaaaataaaaggcacgatgtttccttttttatcgacaaaacgctttgaaagcggaacccgaatctcctcagcctcgactgttttacctggcataaagaatgatagatcatatacttgttcgtttttttcgctcatgatgaaaactcccttactctttttttataaaaaacaggcctgtaaaaaggcctgtttcactcataccgatcttaattaaaacgtttcagaaagcttttccggcacatcgaaatcttcaaaggtaaacggcacttcttcttcgagtgcttctgagtctacgtccagtccggcgatttttgcagaatcaaagttgacgtcatacagagtgacgcgttctgttccgcggcccgatgatttgtcatcaagaacggcttgcagcgtaaaatacgggtcgctgccttttttgacgtaatccatcataaggacggcgaatttggatgtgaccttatagaatgttgccgtgcccgttccgttggcgcctgttgttttatgtcccgtcatgcggcggcccatgatgtttacttctgatttgtttttttccacgtttgcttcaaacgttttaatatgcgccatctcttctccgtcgagaaataaacggccttcttttcctgaaatcgtgttttgcgcttttaatgccatcttagtttacctccacgttaaagtagaatttttctgccgcatccacaggctgtacggcgagatcgattaaaaagccgtcgcggtcttcattcagcccgattgtaatgtctttgtctgaatcaaagttggcgatgccgcccgcatcctgaagcgtagtcaaatattgaatgatcatcgttttgacgaattgaaggccgtcatttgtcgcaggaagatcgctgcccgtgccttttttcgatttaattaaggctttcagttcacgtgtcaaatcgttattcaccgcatcaagcacacggacgattttgtttttcgcgaactttttgtttttctctgccgtaaatgtcaccaatgagttgatatctttttcaacgctgactgacttatcacgggcatcataagagaaaaggaattcacctttggaaagacgttcgatcacttcatcatgagtcaggcggtgcagcacatcgacggcgccttcgtattcaacgaatgttaaggattgattaaatgcggcgctggcacttgcgcctgccacccaggcggtcgcatcttcagctttaatctcggttccgtcttccagcaggacaccttcagttacattgataatgccttcataatccccgctgtaatgggcggtcaccccttgcactttctgtccctgcgcatcgcgaaggcgtttaatgaatgcggcaaatgtcgctttcagctgatcgttttccgcgacaggaagagcgatgacatcgaaattctccgtttcagcagcagctaaaaaatccgtatagtctgagttgaccggtgctttatcagttccgcccgcgagacggatgcctgcctgcgggtttaacgtttccccggattcttcctcagtgcctgtcagcgggatggaagccgacagttcgcccgttcccgtgaatgtgacatagccgtttgcttttaattcttcggcttttttcaccgtttgtttgtcaacttccgctccatccatgtaagtggtcacatcgaaagcggtctgatcaaggacgtttttactgatgcggatgatgatgtcatttccttttgaaccgccgtacaaagcggttgctttaacaccttgtgaaagatcggcgctcgctctgattccctctgtcagacggtacatcaaaacggtttttgctttctttttcgcctcacgaagcagaatcagtgacggatcttcaatgctgagccccacttttttattcaaatcttcaatgcttgaaatggaaacgaatgttttcgcttccccccagccggatgcgacgggaagggcgacaatcccgcgttcaccgatcgatacccgttcctgggcggttgttttaaagttaaaatagatcccggcacgttctttttcttttccttgcgtaaatgttccgccgttcattattgcatgacctccttggttaaaaatgcttcaatgtaagacttggcttgcgcttttgtcatttgtttttgcttcacgccgaataaagccccctggagaatctcaggttttacgccgaaaagctccttcgcgtgctttgttaaatccgccgtgtcataaagaaccgctcgttccgccgctgcggcatttttctttttatgttgtttcacttttctttcaccccgctgttaatgtccacatcccgcagtgcgggagatgtttgtttctgatagtagtagcggctcgtccagcggattgtgatcactgcctcgcctttgtctccgactcttgtttcgatacggctgatgcggacgaaatcaccggtatcctcccctgattccgtaagcagcggaatcagctgtcttgattctctcaccgcatcagcgatccggtcggctgcatagagcgcctgcaccgagtcggcatggaacagcttcacattcagactgtacgttttcttataagtggagactgtatcattttcgtcaaaaacaaatgggggcggaatgtatagtgacggtacctgaaattgttcaggcagttcattttcatatacgggcacgccgcactgctgatacaaaaaagcggcgattgaaccggtttcgcgattcatccgatatctccccccaacgtgttaagccactgattgaaacgcttgtccagcgattcggcgaagagtgtttcatacaaaagaagggctttgtcccaaaacccattcccgctgatccactgttttttgagcgccattcccgttgaagctgacggatcatagatgaaccgggagccttgaaaatacccgggcacccatctgacattttcatctgagacggtccaatgtccgtcatttatgaatgaggcatactctacattggtgccgatttcaagggtcagtcccccgttttcaatgatccatacatgatcctgcgctccttttcggaaagaagacagcaggttttctgtttcaattcctcccgaatgaacaagctcctcccttaccatgtcgagaaaatcctctcctgactgttccagccattcgcctgcctgacgggcaaattctccggatgatgccttttgcagcgaccgattccattgctcaaggttttttatgctcatagtctgtcatctctcacagcgataacctcccaatggtgctgtcttgctttcttcggcatttccagaatatacgcctgtccttcccaaatgattttgtcattgacacgcacagcggcctctttcggaaaatgaacgagaaaccgctgatataccttatgatcaggcgcaagctgaataagctgctgctgtttttcaacaaacagacacggcacgtcttcagcgtcgggcacttccggataagaaaagacaggctggagcttttcggcgggaatcccgaagcgtccggccttcggaactgacaccgtctcatgataaatatcgcatctgtcagtgagcagccgttcgtagctcataaaggtctcacctttgcgtttgcagaaaccggggaataacccggcgtgatatattcacagagcagatggtgcaccgccggttttctgattccgccttcacctgccaccgtatacgagtagtcgcctatcttttcagattgataggcggaagcggctgcttcattctggttgatcagcgcaaaatattgagaaagctttaataacgcaagcttaatctcttcgggaagcggtgagtaaatagggtcagtgaacgaatgccccgccattctggccgcttccgcctccgcctccagaatgtcctgtattagaagcggctccggcctgtttttgacttgatcataaactgaatatgaaacaacgtcagacggctgaattaacataactgccacctccgtcttattctttaacgtttacgattttggcgcttgcatcttcttcttcaaatttgctgtcaagtttagccgtcagtacgataataaatttgcggctgcgaatatctttatctacttcgattcggatattccgtgaaaaaccgagaatgatatttttcgggtgagtcaaaatgatgtcagacgcatcgtactgggagtcaccttctccgaccgagtacggctgcagattggacactcctttgaccggaacgccgaatgctgaagacaaaccgccctgcaccgcaagatcccccagattggtctgacggtcagccacacggtctttccattcaatctccatgccttgagatgtgtaaaatctgaattcctgaggcaggcgcaaatattttgccggaatggcttttaagccttttttaaatgtggctctggacagctcttccccgtttccgtcaatgacgtgagatacagtctgcttacggattccgtcaagctgtgccaagtacggatcagaagaagatgtatcgccgtttacgacaagctcctcaatatcgactgccgcccgctccgccaaaatctgcatgatcgtctgctgcaggccgtctttttcaatattattttcaagcgtgtcataggtgatattaatttccgcaatgacttctttcgtattcagctgcaccgtacttgttgccgggacggtcagctgatcgtcagttaaggcttttccttcctcagcggcacgcagaatccgctgaccgaaaccgattttttcaaatttctgcgagtcattttccatttgaatcacacgcgattcgctgaaaatggtcggcgtgttctgcaccatgcggataaatgctgaagcttgtgcggggttcattaaaccgccgctttttaaagcggaaagtgacatttccgcctttctgatgatatcttgatttctcactctacagttcctccttctgactgggcttaaagcagtccgctccaaatggattttttaacaggctcttggccgcccgtctcttcttccggctgctttgatgcgcctcttactttttcaagcgcttcaatgcgtttaataatcggcgcgagcatgtcctcgacaagcgttttcagcttttcttcatcagacggcgcagccgccccgtctttgtcttccgtgttttggtccaagctgtcaagccgctttaaaagcgggtgcagcgcgtgctcaatcgattctctaacgtcttcttttctcatcttgttcaagtcctctcccttgcggtttcttgatttgcggtcacggtcgagaaattgcttgaccgcgccgaataagccggcttgcttttctgccggctcttcgtaaacgtcagcggttcccgccatgctgtagcccgtaatgataccggctttaatctgatcccatacttcatcggaagctttggtgacaagcacccaagatcctttccggatcacagcattcccgatttcaaagtcatccggggcgacgtacgactccaccacctcgccggtcccgccttcaaaattatgatttgtatcgatgttgcgggcgtccgccaaaaaaccgtgagcggccttttcaatctcttcagccgtcatataatcgccatgggcatccgggacatccggctcgtaaacgatgccgtaaacaagcttctgctcatccgattcgctttttgtaaacacctgcacctttttttcaaatgacggaaggcctccggctgattttgtaaaaaagaattccgtttggttcgccgccttatcgacatagctcacaaaactgatgacggcatttctcaattctctcggcacgagatgttttcaccccctttcaggattgctcctttttccctttcagcaccggccggctgtagtactcttcaggccattcctcaagcgtcttgccgagcactcttccggccagatcacggaggtcattaggagagaccgcgccggcggaaataaatggcgtaagcaccttcgcaatttcaagcggatcgcgaaaatcaggcccctttaatgtgagctgtacatcgtggagccccagttcaggcaaaaataacgtgttgagcttattaatcagcgttttccgctccggctgaaacacctgctcctccgttattttccgtgccgtatcggcggtggctttgttgtattcctgcgcctcgcccgtataaagcggcgggagacggaaagcggaacggagtttatttctgcttttgtcgtcatattcaagaaacagcgcatcatcctgcagaatttcggcaagtgatttaatttccacagacacgggcgtaatgtcttcgcctccgtgaaggtctttttccttcgcaatgccttccgcctcaatcagcagaaatttgtgggcgttttccaccccttccaggtcattcatataatcctggagctctttgtacgatgcttctgacagcatgccgttttcaaccgtaatggcggccggcacgtgacggccctgcttgaaatacataaaattcagttcttccgctttccgggcgccgtacagattgacgatattgccgacccagcgcggaattccgtaagtgccgctgccgatttttaagtgaatggcttcatttgcccggtattcttcagacagggtctttacgtattcgccggttctcatgtccatcatgcggggatcgccgtattccttaaaaaacactttccgaccgttcagcatctgaacatatttacggaaccgtttttgccttttaatcgttttggatgcgccattttcttcataagaaaatgtaacttcaacgggatcagtcacaccgcagacgcgcatatgtttcacatccagatattcaatccccgccggttttcccgccccatcccgaagcacttcgagaaaaccgttgcccgttttttcgcggtcttctatcgcatatccgaggatcgtctcggccgattcatcaaaatgaagacatttgtaaaagctctccagcttcatccagtttttttcggcccgggccttttttgacggggagcaatctgggctatttacatcaaaggtatattccacatcaaacccaaaacccgtaatattgacccgatacgcgtcaatgcactgctgaagaatcgtcgagtattcggcgattgttttcagttcaatgagattatagggcggtgaaatgatgtcttcgccgtacagatcggcaaattgatcttcgttcatctgccttgcctgcggcgcggccatttttgatttaaagacggtggctctaacgttttgatagttcggcaacgcctacctcctcctttcccgattcggacgtctccgtttttgtgatgcatctttcaaatccgccgcgtcatagtcatccagcgcataccaaatggctgaaagtgtgtggggatcaattgaaaactcatcttccgacagaacgccgtttttgttttttgcgtacgttaagttctgcaattcgcggatcgtatgttgacagctgtctgagcaatagatgtgtttgaaccgtttcagtttttttgtatactgaagtcttgagcccggaaactttttggccgcaaccatgcaaaagccctgcctgcgaaaatattggatgcttttcggctcagccgaatccgctttgatcagctctttttgatccgccaattcctgaagctcctcagctgtctgatcatcggtcattttgtttttgtaatactcccagaaaatataaagctctttttgatccggatcgacggcaagccggatgaccgcattgtatgactcttcaaaaccgaaatccatgccggtccgaaacagggggcgcctgatggaagcaatccgctccgttacttcgttgtgctccatgacctgaaactgcggaaacacgcggatgccgttgacgccgaactgtcctttgcgggcgatccggtataaatcgggatcgtaatgccgtaaactgtccagctgcttaatatagcttttcggcaaaaacagattatcgcacgctgtggagtggtggtaatacgtatcccccttaacgacggtgcctttttcatacagcgtctgatcatccaatacgaagcgttttttttgctcatcacgaaaaaaatgccggtacgtccaattggaggtgccgacgggatttgtggtgcatatcatatgaagcgaaagctcgggatggcgcagacgcccgatcagctccttaaagccttcatacttcacttcagagcattcttcaatccaaatcagtgaaatatgatgaatggatttcaatttggccgggttgtccatccctttaaacataatccggcttccgtttgaaaatctcagctgcatcggtgaagacacggcttttacggcaagtcccagctcaagctccccgataatatcttcaaacaaggcaaacgtagaatctctgtgcgtatcgaaaacttcccgcacgacaagcgccgtccgcttttcacgaagcagcttcaggatgattttcagcgcggtatgatagctttttgacgaaccgtagcctccgacgagaaattggtacgtttcattccaattgaacaaataatcttcaaagcgcgggttgaccgctttttcaatcatgaccgttcctctttccgcgtaatgacaatgtcaatcggcttttggctgtcttctgttttttccatcttctgctgtgccagctttaatttttcattttcgattttttgtttaaattgatcagggaaaaggtcaaagtacaaggacagcttttcaagagccttcatcttgtcggcaagctttattgcaatgccctcttttccgagttttgcttctgtgacgatggttccgtccagaaggtgcgaatctttaacgtcaacgtagctgatttcctgcataatcggcttatcattttcgtcaaagagcggccctgattttccgaaggcctgaacctctttttttccgaaggttacataatcggtaatgtcggcgaaagcgattttcacatagacttgaagaacgtccatcgcttcgacaaacactttattgaccatttcctttttcatgcggctgatttctttggcgactttttcgttttttaacagcctgcttcccgtcacatgcgcgctttccggtgaatacccggcttttatcgcagattgggtggcgttaaagcttttcacataataaagacaaaacagccgctggcgttcgtttaactcatcaccttcgcccggggtgctttttccgccgctttccgcgttcttatggagcgcctcgtcccagcgcccttcttttttccatctgccgatcgttcttgcggatacgcctgatttgccggcaagggcgcgatttgtgatgcggcctttatgagactgatagattgtaaatgcctgttctctttttgcgtttttcatgctacggcatcaccgccacctccgacatgattgtctataataaaaagcggcttctaatcgggccgctttttgtgatcgtctgttcacttctaggtggcaaacgtatgacaacttatgaagcaggcgattgatttctttgttcctgctgtttttgtattttcagaagcgcccgtttgaccgtcgtctgtacggttgatttctttacattcagcaaggcggcaatccgttcatatgaaaagcattccgctttgtggagcagcagcatttctttttctctatccgttaaaacggctaatgcgtcccgcagtctgattctgtcttcttcagtcacattcccggaaggttcaaacatcagcgcctgcgaataggtttctatgattctcggatctttaatcagcattctctgataagcgtctctgcggtctatcgctcttcttatgccgggctgccggcctttttcaagccattcgatgacatattccacatctgtaatgatcgttctgatgatttttttatctttcagttcttctgaagtaagcaccgtttcatcggcttcctccagctgcttgtaccactttttcgtctctttcagcgtgcgtttatattcaaatagtaagtcttccatgcagatcctcctctttttcggaacaaaaaaaggacaccaaccaatgcgcagcatgtacgcgattgatcagtgtccgcaggctttccgtcttggacgtattctgtttttttcgattaattcaatttaaagccgatttcatattcgacccgggccagatccccttttcgcgtttcgacaagcgttttgccgtgctccggcgcttcggcgagccatgcttccttcttcagtccgtctataataatcacccgaaccttgccttcttccagctggctttgtaatgttgtatgttcaatgtcagtcagttttttaggattcatgttttacgtcctccgtttttttcaggatgtttacttcatgtatgagacttccgagctcatttatgaacgcttctttttcttcagaactttctcaccggagcaggcggagagccgtttcggccgcctcaaaaagttccggagcctttgccatcaatgccgcgttgatctgctgagagtatgaacttaagttgaaaacggccgcgatgagccttccgtttgaataagggaacttctctttatccgcttcgctgtaagcggaataaatgtaaatggttttttcttctccgctgtgtacggcccgccatggagcggggctgtgtttttcttgcaatggttatcctcactttccatcagcctcatgccatgcttcaatttgcttttctatccgtttcgccctgaacagcaggcaaaaaagccatttaatatatttatacacgtgcatcaagcctcgcttttgcgtcttgaaccattcgctcaagacgtttaatgaccggcgttaaatcagtgcctgttttgcagttcgggcaagggtgaaagacagcgccgaaacccgtttccgtcacaatgaccttcttcggcccgcacagcttacacattatctcgccccctctaatctgtggtttacgtcaaatgaattgccattaatgatgactaaataatcgctgcacatctcataaattcttgtgcctaaggcttcatcaacctgcaccagtccgtcacaggccagctcgctcgagataagaaccggtttatgatttaaatagcggtaattcacgacggcgtacatttgttcaatctgccaatcggtcgcccggggttttccgttcagcggtttgaacagatcgtcaataaaaagcacatccgcctgtttcatacggccaagctttgcatcaagcagatcaaaatcattttttaaatccgtaaatccctccacaaaaggaaaatacagcacgggtgtctgcttctgtctcatgacataattgctgagagcggtcaaaagatgggtttttcccgaccccggacgccctaaaagggcaatgctgtttttccggcagtttttaatcttgtcgaagttttcaacatattcaagggcgcactcatatgcgtcgacgactgcctgaggcttgccccgcgtgataaatcctttgaaatccagcttccgaaaggcgcctgtaatctcacttgcgctgaggatgcgctctgcttttcgttcggcggcgcagcggcacttaacccacacatccattcccagctggtttttgagataaccgccctgatctttacagagcggacagtcaaagcggctttcgtctgattcttccggtctgtccgccagtaatggacgttttccgtttttcaggtcggccagtatctgctcgatcgttcgttttgtcatgtatcgtattcctctctttttttgttgtgattgtccttcccgcaattcgtgcattcaagcggtcttccatatacttggcgcaatagctgaaagccttgatcgtttcagctgaagctgtgcgccgctgttcaaaagcggtaaagcattcgccgagccatttgattgcttcttgtgctgacgcaccgagggaaacaatacgggcgatggcctgataatcccggggcgacgggtatacgctccgcccctcctgtgcagaccttaatctgataaaatgggcggcaatgtcgttaatcgtttcttcagcagtatgattttttgttatatctatttctctccggacatttttgtcccggtgatccgccgatattgtccggtcagttgcttccgggcgggtcaatgtctttttcggcgtgaatcttttcgagtgctttacggagacgatgagtccgtaaggggcgcggacggttttgatatattcatgctgttccaaaacctcaagccaccgtctgacggttttttcgctgacggcaaatacatcggccatctctcttgcttttacgggcttatgaccaaggacgatcccccactttacaccgtcttttacgtgttcctttgtcgttgagctgatgaaccataaaaacagccaaatggcggaccctattttgtcataatgttctgaattcagtaatccggaatagatgaaaaacgggtagcttttacgattcataagggacgtctccgtttgtcttcagacctatatagcgttcatactgcaatcggttatcaaatcggaataccggaagtccgcaagcggtaaaagatatcgaaccgcctgcttttcctaaacatctctggtcagccggatcgctgctgaaacggatgattatcggctgcatctctcaccctcctgatcaattttttatcgtacattgatacattttgtatccttatgatgttgattatatacgatacatttcgtatcatcaagacctttttgatactttttttatcatctctttattttgatacattttgtatctataatcataagtaacttagggtgttgaaaaaagagaggtcattcggatgataggcggaagattaaagagtctcagaggaaagaaaacacaggaagaagtcgcaaatcatatcggtgtctcgcgcgccagatattctcattatgaaaacggccgatctgaacccgattacgacacgctgcaaaagcttgcggattatttcaaagtgtcgactgattatttgttaaccggaaaagaaccttcagatgaagacatgtttgccgatcccgacctgcagatcgcatatcgggacatgcaggacttttccccggagagcaaacagcaggccattgaattcattaattatttaaaagaaaaagagaaaaaccgcaggccgaaacataaataatccgctcttttcctttaaactgcttaacgttcagccgatataaaagctgaatgtttatttttaaaagaaaagggaattgattcaaagtccgatcagggcttttctttctcgcttaaaaaagaacatatgttcgaaagggtgtattcaattgggcgattttttaacacatcttgaggaatacgtcaaaaacttatattgccgcatgggaatgaccgcccctctccatattgatatgcagatgattgccaaggagcttgacatttggattcattttgaagatacgcacagtatgatgctgaagcgggacggcatgtacagcatcgtcctgaatcaaaaaaagtcacccgaagagcaatggcaggattttgcgcacgaactgtgccatgtgctgaagcataccggcaaccattttcatatgaacaagctgttcagagaactgcaggaatttcaggccaaccattttatgtaccacttctgtgtgccgacctttatgctgttaaacatggagcttccccagcgaaggagccacgccgtcattttaatcgcagccgctttccgggtgacggcatcatttgcggaaaaaaggctggagctgtttgaacggcgtaaagcaggtattcaatttcagaagcggctcgcttgtctgttatccgacaagcggccgaatgtgtattatgaaagcggacagacacacttgcatgccgctgaagaaaaaacgccgtattttattgaaaattagcgatactctgccggcttggaacgcagccggcagaatgtcatcattctcaccgtgctgcccgccacgcacttcttgcgccgcatagcagctccagtaaatataagaacgggccccctgttcatttatcataaaaaccggccttcacggcttctacataccgaaaaaacagatcggttggcgtatatttttctccccggcagccaaaattgctgaacagcgcgtgtctctgcgccgtgctcacttccaattgcagccccattttcctttttgtccgattgacaatgttgcggggatttacacctgccagccgatcattcttctctgtcagctcggcatcaaaccccgcttcacgcagcagatcacaaatcagtcttgctttttccagatccgcgcccccgacgagtgtatttgcctttttcagatcatgatacccatgaaaagccaatccgtaatgatgggcggtcactttttctaaagccaggggttcgtcaaagcgtgtgcttgtcaaatggagagaacggttatcgcaccgcttcgttccttcaaataaataaattgagctttggtcagaaaatgcccgcaccagctcactgacacccggctcaatcctgccgccgtggggagcgaggacgatacatttacttccctccttttcttcataaataattctgtattccgattcagcagcagatagggctgcgaaattatcatatctatctttcatgtgtaacatgctctccttttccagtcagcaccagtttactctactcacctgggaatggaaacctttttatagtatgatttgatagaatacgtatcagggggggatatatcatggggttcatcaatggattgctgggcaatgcgtcgacaatatcgacggctgaagcaaaagcagaactggctcgtattctgctggaaggtgagaatgtcaacgccgcatttaagcttgtccgagatatcattgtctttacggataagcgtcttattcttgttgataaacagggactcacagggaagaaaacggagattcaatccattccgtacaagagcatttccagattcagcgtagaaactgccggccgctttgaccttgattcagagctgaaaatttggatttcaggcgcggagcttcccgctgtctcaaagcagtttaaaaaagatgaaagcatttatgatattcaaaaggcccttgcagcagtttgtatgtaagaagaaacggaagcccggggggcttccgttttattgattacagtttttcttcaattttcgccttcgttttcgggccgtaaattccgtctgccgttaatccgctgacggattgaaaacgttttacggcatttgccgttttcggaccgtaaacgccgtccgccccatgattttttgctcctttatcgggataaaaataaagagcggataaagcgttttgcacttgttttacgtttgtccctttcgtcagcggtttcgtcactttgatcacaccggatggaagcggataggaagacacagcctgactttttgaagaagaacccgtctgagcgagcttgatcacttgtccgactgtaatgtgattcggatcggtgatatggttgatgctttgcagcgattttacgctgacaccgtgcgatgcggcgatttccgataaggtgtcgccttttttcacatggtaatcagacgcggaagaagcaatagaggcttttttcgccggcatactcccgcttaattttttttcaatcttcgccttcacttcatcccagcggccttcagacaaaatgcggtgcgggcagtactttccgttccagtcctgatgctttctgattctgtcaatcccccagccccgttctttcaaaagctgcgccgcgaacgcaatcgccagttcttctgcggctctgtaccgttcgccgcctgacttgctgtaacagatttctatagcaatcgactttcggtttccggtaccgttcgtgccgtctcccgaatgccaggcattccggtccaacggaattccctggatcacttctttgtcatcaaccgcaaaatgatagctcgttgattcgctgtttcccgtcatatagctgatttcattagcggcggatgcgtcgtttgccgtgttatgaatggtaatatactccggcgtcatcggattcggacattttaacgcatatttatcagccgatacgagccgttttttcacttcaatccccactcttcatctctccttatgcctttttcatcaataggtggcattcgtaggacagataacttgagcatatagaccctgcattcggataaaaatggaatggatacgcacgcaaaaaataagacccttccacagaagggtctttatgttatgtttggttgcgcgcggcaatatggaatgtgccgtccgcttggttttccaaatggctttcatggccgatcacctgtgtaaagctgaacccgacagcaacaagcagcaatcctgacaacagtttagatttcatatagacaatctcctctctggatttgtttttgggcgtgcaccattttttcataaaacgtgagcgctttttcaggctgtccgtgtttcatgtaaaatttggcagcgtcatgcgccaattcttccacatacggatacagcatgtgttcttccagaaaatcaaacgtgtgcctgacggatgcgttatccatttccttgccgtataacgcatgtaaaaattggaacagattcacaaacaattcatcattgtattcgcgggcgatactgagcccgaggcggtattgcttctctgcttcggctgtagtgttctgtttataaagaacctgtgttaatgagtaaatagaatgcggaagattatcgaacttttctgacctgcaaatggaaacggatgtctcaaaatattcggctgctttagagaggtctcccattttttcgtaacagtttccgagattatataaggctgaactgataagacggggattgccttcttgttttgcaagatctaaagcaagttctaagtggggcaatgctctttctggatactgcatgtcatcataattccctgcaataacgaattcacattggattctgcggacgttgtacgtctcatacgattggtacgtttcaagggcttgaacggcataactcatggagacgtaggtttgtttcaggttgtaaaatatctcggccattttaaaagcaaactcagctttctcgatgtcatcagaaacgagtgcaaggtttttttcagcccgtttgtaatacatcatggcgtttaggaacattttctgtttaaattcgtacattcctcgaaaaaaattaaagtagtaatcaagcagtcctgtcagtttatactggttgccttcaatgtcttccaataattctgaaaactcaggctgagaagggtcctcttttaagggcttgatgtaatccagcatgacacggtgtctgaattccattaatgaataatacagcagcagatcctgatcttcttccatatcctcgatctctctctctacttcacgtttgacgcgctccgcctcaaggacgtgaaactgccggatatgggtataccattcattaattttgagcccgacaaaagaggacggaatagtctgcttcatcctcaataaatccccccttttggaatgaccgagatatgtcatattttatcatatttgctagaaaaagaagaacgcaaaaagaccgcaattgtcgaatttcggatatccgcaacgatttatctccgtcacaagcttattgcttgtttcttccgtgccgttgatatagcatatccttgcagctttttattctgtattaaatgggggttttcacatgacagcacaaaatcaattggtcagccactttctgtcacatcgaaacgtgacgattgagctggcggaaaaaatcagccgcgaacattacgattacaagccggcagagacatcaatgtccgctcaggaacttgtaaaacacatggtttattcttttcttatgtttgcaaacgtcattaacgacggaaacgcatcagccatccagaacaaaccgaaagaagaagcagaaacagacctcgtcaaactggctgaaacgtgtactgaaaaaacgacagacatcctgtcacagctgacagaagagcagctgaaccgcgaaattgacctgaccgcctctttcggcagaaaagtgaccggcgcggctctccttcagcttgccatggagcatgaaattcatcataaaggcaatcttttcgtgtatgtcagagaaatgggccacacggaacttccgttttatcagcaaaaatcataatccggccatccgccggtctgcgacataacagcaggctggcggattttttgttctgtataaaattttccgaaaatttaattgattaccgcctcttaatcatatataatctgataaaaatagtaggattattcaggaggcacacagatgacagtaagcattgtgtttatgggtttctttgtcggaacgcttgtcggattgacgggtgtgggaggagcagcgcttttgactcctttactgatcgttttggggatcaacccctcaatcgccgtcggcactgaccttttatataactccatcaccaaactgttcggtgtcgtttctcattggaagcagcgcaccgttcaatttaaacttgtcggttacttggcgctcggaagcattcccagcgcaacagccgccatcggtgttcttcacgtgtttcccgcttttcaccagcatcaggagcagattatcaaacaggcgctcggctacgtactgacccttgtcgccatttccattatcgcccgcctttttttcgataaaagactgcggccgaaccgctggcagcaaaaaacgcttgaagaaaagcggacactcatgatactgatcggcgtcattttcggtttcatcgtcggcctgacatctattggatccggctcattatttgcgatcgccatgttatacctgttcagaatgaaaacggcagaagtggtgggaacggatatcgcacatgcctttctgctcgtaactgctgccggtttgttaaacgcaagctttggaagcgtcgattacctgcttgtattgaatctgttgatcggctctgtgccgggtgtgcttctcggcagcttcttttcgccgaaattctcaccgcgccccctgcagtttgtgatggcggcgattattttaatcagcggaataaaactaatataaaaaaggcggtctgttgtcagatcgccttttcccttataacgtcacaccggacttaaagattgcaagctcccgaaaatcgtttttttcgttattgacgaattctccgcttgcaactttaataatgtattgaataaaatctcttacaatgtgatcttctgttgtttggtcttccgccaatctgcccgcgttgtaatcaatccaatgaggctttgattgaaataaatcggtatttgttgatactttcacagtcgggacaaatgtgccgaacggcgtgcctcttccggttgtaaacaaaacgatgtgacagcccgccgcggcgagcgctgaagaagcgattaaatcattgccgggcgcactgagcagtgtcaatccctttgttttcagtgtttcaccgtatgtcagcacatcagaaaccggtgcaagaccggctttttgggtgcagccgagcgacttgtcttcgagcgttgaaatgccgccttccttattccctggtgacgggttttcataaatcggctgctcatgcttcataaaatattgcttgaaatcattgatcaatcggactgttttatgaaacacttcttcactcgccgcacgctgcatgagaatcgtctcagcgccgaacatctcaggcacctccgttaagaccgtgctccctccctgtgcaatcaagtaatctgaaaatctccctaataaagggtttgcggtgatgccggaaaaaccgtccgacccgccgcatttcaatccgatgctcaattctgacagcggaatctcctcacgtttatctccctttgccgcaaggtgtatctctttaagaagcgcagtacccgcttcaatttcatctgtgacagcttgtgattcgagaaatttcacccgatctccattcacttcagaaagcgtttccttaatcgccgcaagctcattattttcacagccgagccctaaaaccagtacaccgccagcatttggatgacggatggcgttcatcagcatttgtttcgtattctcatgatcatcgccaagctgggagcagccgtattggtgctttaaaaccagcacattgtcaaagggcgcaatgtctttcgcctcttttacgaagcgctgcaggattttctcagcgacgccgtttacgcagccgactgtaggcacgatccacagttcattccggacgccggatgtaccattttctcttctgtagcctttaaatgtccggttctcatttgtaaaaggattgtcctcgaagcgcggtgaatacgtgtattcttgcacatcggataaatttgtttgcagattatgggtatgaatatgctcgccggccgaaatccgccttgtcgcacgcccgattgaaaaaccgtatttaatgatgctgccgttttcttcaatggtttgcagcgcgattttatgcccccgctttacagggtccttcacttcaatcgtcagtccgtctgtatgcagccgctcccctttgttaaaatggcgcatggcgagaagcacgttatcgtttttatggatttttatgacctctttcatttcacttcccccttttttccgcagcattcatgtaacgcatgcttcataccccgcttatgaatgacagacagaaaaaaagccgttcgttcagtaagccccggaagatgattcagattctccccccacaatcgctcttctcctaatatggcagatgccgcttgaaacatatcatctttgcaacgggaccgcgccatttgaaaacggttaagaacctcctcgccgtctgccggtttgttcggtccgttccagtatgaatagatcatggcgctgaacgaaaataccagcttctcaggtagccggccctcctgttcgatataagccttcagcgtcggcaggtttcttgttttgaatttcgcggcggcgttaagggtaatgctttgcagataatggtggatataagggtttttaaaccgctgtaacacatctgccgcgtattggatgacaccctccatttgcagcacagggaggatttcttcattgatcagctcttcaatgaatctgcccgtcacctcgtgctcagccgcttcccggacggtttgcagtccgtatagtaaagccactggcgccaatgccgtgtgagcgccgtttaagattctcaccttttttgtcctgtaagacgtaaggtcagacgtgatcagtgcgttcagcccggcctcagcaaaaggaagctcattctgaagctgttccggcccttctatcacccacaaataataatgctcaccaaccacaagcagacggtcttcgtatccgagaaaatcggtaagttcttccgcggtatcaacaggaaatccgggaacaatccgatccacgagggtattgcagaagatgttcgcgtcatgaatccattgagtaaaaccaggttccagctcccacagcccggcatattgaagcacggccgccttcagtttccgtccgttttcttcgaccagttcacatggaagcataatgcaccctttctcggcgtcacccgcaaatgccttatagcggaaataaaggaacgccgctaatttcccggggaatgttttttgaggtctatcctcaagccggtcgcctttctcaaacgtaattcccgcttccgtcgtattggaaatgataaaacgaagctcctcttgtgctgccagccgtttaaaggaatcatagtcagaaaaaagatcaatgccgcggctgatggatttgacgatcgtgtgttcttcagccggttttccatcctttatcccctgcaaaaaaagcgtaaataaaccgtcctgttcgtttaaacgtttgattttctcagagcctctcggctgtactgcgaccacgcttccgttaaaatccgttaattgattcaattgatcgatctgccagtctgcgaaggcccgcaaaaagttgccttcgccgaactgaaggactttttcaggatattgaatgtattcgccgcacatttttttattcagctgccgcaagctgtccgcctccttctgctttttgcacacgttaacattttttctcgcgaaaacccggttattcagacgagccgttatgtgagttttttgattgaatctcttatcatcacctcggtgttttcatacattttttccgccgccgtattcgggtcggcgataagcgccaaaatcttctctgcgccgagtatgctgattttttcaaccgggcgttttactgttgaaagcctcggcgtcatatattgggaaatcccgatgtcatcaaacccgataacggatatgtcttccggaacgttcaggcctttggcgaaaatggcattcatcgccccaatcgccatatcatcatttgaacagaaaacagccgtgggcggtgattgaagcgctaatagttcttccatcgcctgactgccgctttccatatcatagcggccttttacactgtattcatgcttaatcggaatagaatgatcaattaaagccgtcaaatagccttctttccgctgtgctgttgacctgaatccttccttcccctcaataatcgcgatatctctgtgtccgtttgcaatcaggcagtcgaccgcttgtctggaaccttctttatcgtttgataaaatattggtgatgctccggtcgtcaatgtcccggtttagcacaacgagcgggatgtttttctcgcggatatgataaataaaggaattatcgctgtcgctttggctcattaagatgattccgtcatacctcatagtcgtaatggtttcaaagcttttcagatcatcaatcgcgcgcacgaacaaattgtattcctcactgattgtgcggtttacacctttgatggtgtcggaaaaaaagctgtgtgaggttccgtttgtgatgcttgtaaaaaacagtccgatcgtatgggacttttgcatagcaagactttttgcatttacattcggtgtgtaattcagctgtgaagcgagctctaatattttctgttttgtacgctctttaatgtaggggctgccgttaagtgcccgggatacggttgtgtgggatacgttggcgagttttgcgatatcttttatggttaccattcggttttcctttctttctgtatactgtcatttatttctattgtaccattaacgggcagtccataaaatcactaaagttaaggttttgcatgatgtaagtcctgaacgagctcggcatgctgccggtccgtcagcttatacatcaaaccgataatcagcatggcgcacgctaaagcgaaagccgggtacagcagcagaagcgctttaatcccgatcagcgtgccttttgtctgagatgcattcgggatatagccaataacgctcagcccgatgcctgaaagaaaacctgataaagattgggcgagttttctggagaagttgaaaagcgaatatgtcgtcgcctccttccgttcacccgtcttccattctccgtaatcaataatgtccgacacgagcgcccacgtaatgccgtttggtatgctgatcccgataaaagcaatgctcgctaacgccgtaaagataaatacgtttgacgggagacagaaattcagcgcatcagccgcggcgctgacggcgaaaccgatcatcaccgtttgcttttttccgaaacgtttgacgagtttcggcataaacaaaacacctaaaaatgaagaaccgatgatgataaaactcatgtaggacatcagctccgcattgttgagattgtactgggcgaagtaaacaagcattgcggatttaatgttgtatgccgatattgagaaaatcgtcatgaaaacgacggtcagaagcggtttgttgccgataaagcatttgaaaaccgacatgacggaaagcttttctttcggcgcttcacggacgataattctttctttgcagtttcggtagcagatcataaatcccgcgattccgattacggccatcattcccatgactgccgggtagccgatgtgaacgttatcaaaatgaacaagaatcgggatgacgatgacacttgtaatgagcagcgcgccgagggagccgatctggcggaatgcggaaagcgccgttctgtcctccgcatcctgtgtaatggccgcgccgagggagccgtacggaatattgacgaaagaataagcgaccccccacagcatgtaagaagcataggcgtacacaagcttccaggtgacgctcacgtccggtgacacaaaaatcaatacggtcatgaccgcaagaataatacttccgaataataagtacggcctgaatttcccccgggggccgatcttttttctgtagtcaatggccgagccgacaatcggatcagtcacagccgcaaacagcttgctgaccaaaaaaatactgccggcgaacgctgccggaatgcctgcgacatctgtgaaaaacttcagcaaatagatctgcccgagatcaaacataaatccgttcccaaaatctccaaaaccataggatactttttctttcagactcagcttatgctccttcacttttgcggcaggtgctgtcacgacaggcacattactcataggccacctctttcattccattttttaaaagcggaaatattcctcagcattccggtaacaaataccctcgacaatttttcctaaaagctccatatcgtaaggcgcttcgccttgttccgcccagccgccgatcagcatgcagacaagccgcctgaagtattcatggcggggataggacaggaaacttcttgaatccgtcagcatcccgataaaacggctgaacaggcccatgtttgataacgctttcatttgctggagcattccatctttcgtgtcattgaaccaccaggctgtgccgaattgaattttccccggtgtttttccatcctgaaagctgttgatcatgctggcgataatatagttgtcattcggattcaaagaatacaaaatcgttttaggcaattgccgctttttttcggcggaatctaacagccgggcaagcggttttgcgatacgttcatcattaattgagtcatatcccgtatcaggaccgaggctgctgaacttatttgtattggtatttcttaacgcgtttatatggaactgcatcgcccagtccagttcggcgtaaagaccgcaaagatattgcagcgtccgtgttctgaatttcttttcatcttcaaaagacacatgctctccgcttaatccggctgcaaaaatccgggccgcttcctcttcggtcgtctcggcataaaccatttgatctaacgcatgatccgacactcttcccccggcattgtgaaaaaagcggacgcgggattctaacgcatctaaatacgattggtaggtggtgacagccattccggaagcgctctccagcgaacggacccaatcggcaaaacccgggctgctgatgtccagtcctttgtcaggccgaaatccgggcagcacttgaaccggaaaatcactttctttcaacagttcgtggtatgtcagcgcatcggcaggatcgtctgttgtgcaaatgactttgacatttgatttcagaatgagatcctttgcgccaaacccgtctccctgcaggagctcattcgtttttttccaaattgccgcggccgttttttcattcaatacgtcataaatgccgaaccagcgctgcagctctaaatgcgtccagctgtacagcggattgcctatcgccatcggcaccgtttttgcccaggcgaaaaacttctcttcatctgaagcgtttccggtaatgcagcgctcttcaatgccgttgcccctcatgatccgccacttgtagtggtcaccgtaaagccatgcctccgtaatcgttgcgaaggttttattttcatagatttcctttgggcttaagtgacagtgataatcaatgatcggcatgttttcggcgtattcccggtacagctttacggccgttgtactatccagtaaaaaatcatcacccataaaagctttcacactttcatcctccctcttaaaaaatgttaacgttaacaaaatggttcttttttattttagcttcctctttctcacatatcaatcatttttattttatttttcagaaaatttcatccgttaacattttcatacaaaaaaagacactgccgagaaagtccggcaatgtcttctgtgtgatcttaaggattagtaagcgaggctgaataatcctttgatatgtgttaaataacgtacgttacttgcttctttcattaaagatgccggaagacctttcagcggagtagagttcgctccgatgatggcaaccgcgtctttacgtccgaggcttgcaagcgtaccagagtttacaggcttgaatgtttcaagcgtttttccttctaagtaagcgaacaggttgtaaccgacaagttcacccatctgccaagcgatttgcgctgtcggcgggtacggacggccgtccggcgcaaagtatacagcgctgtctccgacaacgaatacatcttcatgagaagtagattgtaagaaatcgttaaccgtcgcacggccgcggttcacttcaaggccggattcgccgactaacgggttgccttgtacgccgcctgtccatacaaatgtgttggcaacgacttttgaaccgtctttcagatcaataacgtttccttcaacatttgtaacaggaagacctgttaagaactcaacgccgcgtttttcaagactttttgtcgcgcgttcgataaggtcatcaggaagaacaggaagaattttcggacctgcttctactaatttcagtttgattgctttcggatctacgccgtattttttcgtaaggttcggcatgatgtcagcaagctcaccgacaagctcaacgcctgttaagccgccgccgccgataaggattgttgcatcagcttcgtttttcgttttagcgtattcacgcacacggtcttccacgtgtttgtatactttgttggcatcagccgcagatttcagcaccatgctgttttcttcgagtccaggaatgccgaaataagccgtaacagaaccaagtccgacaacaagcgcgtcataagtcagcttagaaccgtcagaaagggcaacttctttcttatcaactgagaaagaattgacttctgcgattttaatgtcgacgtcttttcctttcagaagtttttcaagcggcatagcaacagcctgttcagacacgttgcccgctgcaaggcggtgcagttccgtaatgatttggtgagtcgggtatttgttcacaacggttacgcgtgcttcatctttactgtaatgtttgcgaacggttaaagcagaaagaactccgccgtaaccagcgcctaaaatgacaatatgttttgacatcgtatatcctccgtcctttatatcaatttgaatctgagattatttttgtttttcgttcatgatttcaagatagctgttagcaaaacggaacagcttttgagcttgaggatctttcagcatgcgcagcaggccgaaaagtccgatcgtttcattgcttgcatccgcgcggtcttttgcttcgatcgcagtagccgccacttctttcgctgtttctttcaccggctcaagaatttctgtaagcgcacccactgtatcgctcttcaatacttcgtctgtcgctacagactgtgcaaaatcataagacttcgttaaaatatttactaactcagtcagttttggaagctgatccactaaaacagtcagtgattcttgaacttcaggttttagcagctgatcaataagatcgcgttggccttggctgacagatgcatttgtttgatcgattgtttctggcatatccgattctcctttactataagcagtatgctgatttttttggaaagggtagcctttcccccttcatgcagaaaagcatgaaaaagcaagattgtgaattcatgcacaatcatttacaaaaataaatgtttactacccagtttttcactttgccatatccagtattatttttatatcaacaaaaacaattgaataagtcaaaatttctttttcctctctgaaaatagcaaacataaaaaaccccaatttgatttactcttatataataacactttttgaacaaaatttgaacgtgaattgtttcgtttatgaaattatttatatggcgggggtgtaataacgtttcttttaggctatttttttacagaccatccgcttttcccctgtcatttttcccacaattttaatagcgggcccgtttttcccgtaaaggggtcgcattccgggagggggacacggctgatttcttctgaagttctatcatttttctccgtttttgtatcgtactgccggccgcccggataagccccgatcacggtaaaatcaaaactgcccgacagttttttatgtccggtgccggccggaatgaccgctgcgtcccccgtttgaagaacggcatccgctccttgttccccgccgaacctcaaaaccgcgtttccttttaccgcgacaagaacttcgtgcgtggtgctgtgaaaatggtgatacggaaatactccgcccgtccagctgttcgaccaatcgtgccggctgaggacggactctgctttctgcaccgtttcttcattaaataccgctttataaataacaagcggaagattcgggttattcggaatgcggccgtcatcttcaaaataaagcacttgaatatcctctttctgcattgttttcacctccgtatatgtctgtttcccattcatcatttgttaaaacgctattttctcatattccattgcgaagcctgccggtgaatagtatagtataaaaaaatatgtgtcaaaatgagggatttaatgaaagccatcgtgatcggaatattggcatctctgttttttgcagtcacatttattttaaacagggcgatggagctttccggcggaagctggatgtggagctcttccctgcgttttctttttatggttccgtttttatttttgatcgtttatgcgaaaggaaaatgggcgccgctctggcatgaaatccggaaaaaaccgtttttttggctgaagtggagttttaccgggttcgtgcttttttatgccccgattacgtttgcggcggcatatgggccgggctggctgatcgccggcacgtggcagattacaattgtcgcgggtgtgcttctgtcgccgtttttctacgaaacaaaacattcaccggcgggcccggtttccgccagacaaaagatcccgctgatttcgctggttacttccgtcatcatcctgatcggagccggtctgattcagcttcagcatgcgggttctctgtccggccgcacgatactattcagcgtggtgccggtcgtcatcgccgcttttgcctatccgctcggcaaccgcaaaatgctggaacaatacggcggaaaactcgatacgtttcagcgggtgctcgggatgacgctcgcaagccttccgttttggcttttgatcgccgctttcggctggcatagagacgggcttccgtcaatgggacagtcattccaatcctttatcgtcgcactcagctctggcgttatcgcaacagtattatttttccgcgccaccgatatggtgaggaatgagccgcagaagctcgctgctgttgaagcgacgcagtccggagaggttctttttgcactgatcggcgaaatcgtctttttatccgcggcgtttccgtcacttctttcatttgccggactgttcattattattgcgggaatggtcatgcatacattcgcttcccggcagacagaccagaaaacggctgagcaaacgtcagccaatctcaccggttcctgatttttttacgaaaggtgtcctcctgtatgaaagaagaaattccggcaatatcttttctgtcagccggcaaacgctttgaacaaaacaatacgtcctttgatgtcctaagccgtgtaaccggacatattcaaaaaggttctatcacggcgttgataggcccttccggcgcgggaaaaagcacattgctgtcactgtgcaatctgatgaatacacctgatgaaggggaagtgcttgtattcggaaaagaaataagacactgggacatcagagagctcagaaaaaccgcgggccttgcatttcaatcagctcccgtcctcgagggaacggtgcgggacaaccttctgctcgcagaaaaactccacggggcacagcactatacgcctgaagagctcgcagattttacagaccttccgcgcgtgcttctggatcggaatgcaaaagaattatccggaggccagcggcagaagctctcattagcgcgaaccctcgccggactgccgtccatcctgctgctggatgaaatcacctcggcgctggacccgtcatccgttctcatcattgagaaactgattacgaaactccatcggcaaaaacagctgacggtcctgtggatcacccataaccttgaacaagcggaacggttatccgatacggtatggtttatggctgagggtcggcttttagagaccgcggaaacgaaaacgttctttaaggaaccgaaacacgaaaaggcccgggcgcttttacaagggagcgggtgctgatatgaatgatctttctctgttattgacaagtatatttgtcattatcgctttattcctgtctaaatcttttaaagccggcgtcgaaaaggatatgatcgtcgcaaccgtcagggccgtcattcagcttctcatcatcggctatgtgctgtcattgatttttcgcggtgatcacccgatatttatcatattaatggtgcttctcatgctcacggccgcttcgcacaatgtctccaaacggaaaaaaatgcggatcggctcattttggcgcgtttttctgacactggcgatcgcggaaaccgtgacgcagggacttttactgacccttcacatcattccgttcacttcaagatatgtcattccgataagcggcatggtcatcggaaacgccatggtgctctcaagcctgtttttatgcaggctcagttcggaagcagacctgcggaaagaagaaatccagctgattctctctctcggaggaacgcctaagcaggccgtccggcagatattgacgtccagtatgaagctcagtatgatcccgacgcttgaaagccagaaaacattgggtctcgttcagcttcccggcatgatgacggggcagattttagcgggggctgatccgatacaggcggtgcgctttcagctgctgatcgtttttacaacgatggcctccgctcttcttacatgtatcatactcagcgccttgacatatccttcccttttcacggaacactggcaattaaaaaaattcagcagggaagcgtaggcttttttccctgctgaatgatggtttatgacaaggtcagagattcatagtaacgggataattcaataatcatcgctcccatccgctcaatgtccggagcaaggaccctctttaccccttcatcccggatcgcttcagccgtcactttgccgactgcggcggcaagcacttgtttttcgaatgcctgctgcaattcttttgtggatcctttttcttttgcataatcaaagagagagcgcacttgaatggctgttgtaaaacatacggcatcgacctctccgtttaacagctctcccagcagtttatcaaccgtctccctttcaggcggaatatgctgatacggcagaacagggaatacctccgctccgtttttctcaaggaactccgttaagaccggcgctttttcgccatgaagctgtatcatgacttttttatctttaaagtcaaatcgttccaaggagcggatcagccctcttgttgtaccgtcttcatctgaggcatgcggcgtgatgccgagcttttttaaggccgcatatgttttatagcctctgcagccgattttcgcttcatgaacggccgctaaaaattcttctttcagaccgattttttccgataccgacaataacgtttccgtaccgatgcctgtggtgaatattacccagtcggctttttgcccggcaaatgttcttacgtcgggttcaatttgatcctccgccaggtatacggttccttggagggaacggacgaccgccgttccgccctgcttttctattaatcttgtgatctcttctgttttccgcgaaccgccgatggcaatccgtttcccgttcaatccttttcccatcgctgttttcttcttcccttcagatgccgggcgccctatggcaggccgtcatttatttctattattgttacgcaatcagccgggaaaatcaagctatgctcccgttgaatcccccgtgcagttgctgtatcattaaccgggcagaacgatttgattcgcggagggattttcaatcatggaaacaaaaaaagagttcgagacaaaaggatacgatacttcggtcatttatgagttcaatgaatatcctgatgttcacagcggccgatgtgacaattgcgactacacgctgtttaaaagctcagtgaagggcggaaaatttttgagggaatgccggagatgcggcatgaagaaaaacatataacaaaacaggcagccgtcttccggtgcgctgcctgtttctcaatcaattttcgacggccgcatttttcaaaaattcttcaatggcgcaaacagcctgtttggggccgccggtttcttctattttctgctgcatgcttttcacgcggctgaggatgtttttatcgccgtatacgttttgaacgtctttttgcaaacgggccacagtgacttctttcggcggcagatgcacgccaagccccaattcatccacacgctttgcggtaacctcttgttcgtgcatttgcggaacgacaacgagcgggacacccgcattcatcgcctccattgtactgttcatcccgccgtgagatacgaacagctttgctttctccagcacatcaagctgaggaacgtgctggcggatgataaagtgatcggggacatccgaaaaactttccggatcaattgttgtgccgactgacataataacccgccagtccgagtcccgaaacgcgtcaatacacatctggtaaaattcaggccaggcgttaaacgccgttcccagtgagatgagcataagcggacggtcatcggctgcatcaatttccagacttcccgtatttgtgcgttctccaagagacggacccgcaaaacagaatcgttcatcaaaggtttcctgtttcggctgaaaggcccttggcataaagacaatattcagtttttcaggcatgaaaaattcttccattgtcatccgtttcaattgttcattttcaatctgctcctggtattcttctatcgcctgtttggccgcttccagtgtttcttcgtctcttcctaattgaaaatactcattcattgcatagctcgggcagaactttacgaccgggatgccgccgttatccgcaaacaattttccggcaagagctaaaaaatcaaacaggacgatgtcaggaaggtcgtctttgtacagctcttccagctgcggaagcacttcaaccgcttcttccagaaacatcacaaacgcgtcatttttatttacccgttcttttatcgtctccgggtccgcctttatgcttgtgcggtataaaacgggaatggcgcccgttttggcaacggaagcttcaaattcctcagtcgtagcgaatgtcactttatacccgcgattgacaagttcctcggctacaggcagcgtgggattgacatgaccgtgagcggccacattaataatggcgatgtgtgtttttctcatcttttttcttctcccttattttcgtttatctccgcttctaaagactccagcccgtacatgacactgtttcggatcggctcaatccggatcggctcaaggtgtgaaaaggcttttacaattcctttcagcgcgacttccgcttcaagtctggcaagcggagcgcctaagcagaagtgtacgccgaatccgaaggaaaggtgcggattcgattggcgatgaatatcaaatacgcccgccttctcaaatttgttttcatcacggttggcagatgcaacgtagcagagaacgatctccccgcttttcaagcggcgtccgcgaagtttagtgtcgtgccggaccgtccttctgacaaacggagcgggagcgcgaaaacgcagcgtttcttccaccgtttgcgcgatgagagaagggtcctgtctcagctcttcataaaggccgggcgtctctaatatgctgtaaaccgcatttgaaatgagattagtcgttgtttcatttcccgccactaaaagcaggttgcaaaacgggatcagatcttctgccgtgagcttctctccctcttcttcctcttttatcaaaatagagataatgtcttggccgggctgttttcgtttgctttctattatttccgcaaaaaacgccgccagctccgcctcacattggtcacgttcctgctgatttttctccgccgcttcaggactcgcatctttcggcatgctgacgagaatgtccgaccattttttaaactgatccatacgttcggacggaacgcctaataattctgaaatcaccatgaccggcaaagggtaagagagatctttaacgatatcaatccgccctttgttctttgcctgtttcaggagatgatcggtaatgtctttaattctcggctcccattccttcaagacgcggggagtgaaagcgcgattgacggcggatctgatttgggtatgcttcggcgggtccatattcagcatggactttgcaatcgagcttttcacatcagtcatgaggcttgagaacgtctctttatcactgatgacttttttgacatcatcgtataaaaacacactccaaaccttcgtttcttcatcaaagtgtatagggctttcccgtctcattttttcgtaccaaggaaaagggttgtatacgtccaggccgttttttcctttcatcagggttctttggatggcttgtctcgtgctcctcagcttactcatgtttcatcactcctgattgtttcatatttgaatagttgacgtaccttgaattttatcctagcacatattttcaatttttttctattcataacctgaactattaacataacacaacaaaagtcatgaatccggaggtgaaatttctcccaagaaaacagcagaagcgcacaaaaaacccgagccttcggccaggctcgggagatatgttcactcattcgtctgcggtttctggtgctgcttttggtcttcaggaggctgcgtatttctttccatatcgtccgtatcagcgcccatgcctttcaggaaagaaaacagcagagtgacggccttgttgatttccgggtcttttaaagcgcggacgatatcaaaatacccggtcttcctgccgctgtctttttcctcgacggcctttgtgacccccgcattgattttaacgataaacggctcaagctgttttacatcgagcatgccgagaacgccgcttaacaacaggagatttttcagcatattggccgtttccggagtattcgccttcttcacgaggatatccatcactttgtctccctggccgaagagcccgcgcagaagcgccaaaacgccgcgctcgttcatgtgctgaagaatatgcagagattccaaaatcgcgtctttatttcgtaaaagagccgtctcgatctcttctaagtccttttttcgtttgtcttcttctgtgacggtctgttttcggatgccgctgattgctttagccattttgctgtttccccctttttacggcgtctcccgggaatacataatctttacgcgcccatttccgatcaacccggacaccgatctgcggctgcgggtttccgtaacggaaattgattttcggaagcggattaacgccttcttttttcaaaatctccatcttcgctgatgtttctttataagccggtgtatcggtatccttatcggcatagctgcttgtcaaaaggttaatggcggcgtcttttgaatcgttcatcggaagatagacttgtttgccttttaccctgtctgtgatgacgcatttgactttcacatttccgtacggtgatgtcagacggacaagcgttccgtcttccagccctctttcttcggcgagttcgggcgagacctcaaggaacacactcggtgttttttcggatattccttttgatcggtaagtcagattcccttcgtgaaaatgctcgagcagccgcccattattcacatggatatcatattcttcaccaaattctttcggctcggtccactgaacgggatatagaatcgctttgccgtctgaaaacgggaacttatccgtaaataaaagcggtgaatcggttccgtccgctgcaaccggccattgcagtgaattgtagccttcgagacgttcgtaagtgacgcctgcgtagagcggcgaaagcatcgccgcttcttccataatgtctgccggatgttcatagtgccaatcagcgcccagacggttggcgatgtccgtaatgatctgccaatcaggctttgaatcgcccagcggttcaaacactttgtaaaggcgctgcaccctccgttccgtattcgtaaacgtcccttctttttcaaggctcgggcttgccggaagcacgacatcggcgaactcggccgtacgcgaaagaaagatatcctgcacaacgaagaaatcaagcttttcaaatgcggcatgaacatggttaatattggagtcgacaagccccatttcttctccttttaagtacatggacttcagttttcctgagtggatgccttcgatcatttcatgatttgtcattccgatttctttcggcaagtctgttccccagccctgctcatactttttgcgggctttttcatccgttactttttcataaccggggaagctgtcaggcatactgccgaaatcactggctccctgcacgttattatggccccgaagcggatatgagcctgcgccgggcttgccgtaatttccggtcacaagaagcatgttggaaatggccgtgctcgtatcactccctccgatatgctgggtgacacccatcgcccacagtgcgcacacgctgccggcttcatgaatcatccgggccactttgattagggtatccttgtccacaccggtatgtttttccgcatattccattgtataaggttcaaggcttttcacaaattcatctaatccgttcactctctccttcagaaatgcagtatccgccaaatcgtgatcaagcagatatttcgatacggcattcagccagacaatatctgatccggcacgcggctggaaaaacacatcggagcgctcggccatttcatgttttcgcaagtcagcgacaacgagcttctgtccgtgcagtttatgagaacgtttaatgcgtgtggacaggacggggtgagactcagacgtatttgagccgataatcagcacgagctcagctttttctatatctgtaatcgaccctgaatcaccgccgtatccgaccgttctgaacaatccggccgtggcgggagactggcagtagcgtgagcagttgtcgacattatttgtgccgatgacggctctcgcaagcttctgcatcacgtatgattcttcattcgtgcatttggaagatgtgataaaggcaagtgcgtccgggccgaaatgttcttttatatcggtaaatttatcagcgatcagctgcagcgcttcatcccattccgcctcccgaaacgagtctccttcccggataagcggtttggtaaggcgcttttcactattgacgaaatcccagccgaatttccctttcacacacgtcgaaatgccatttgctggcgcctcggcctgaggttctacctttaaaatgtctcttcctttcgtccatatatcaaaactgcagccgacaccgcagtaagtgcatacggttttcgtttttttgattctttcatcccgcatggccgattccatgtccgatatggccaaaatcgatccgtatccggtttcgaccccttttgtgatgtcaatcatcggccgaagcgtctcttggttaatgcctgttaaataccccgcttcgccctccatgcctttttccatcatggcattgcacggacataccgtcgaacaatgtccgcaggaaacacatgatgattcattgatcggcacatcctgatcccaaatgacccgcgggcgtttccgctcccaatcaatgcttaacgtttcggttacctgtacgtcctgacaggcttcgacgcagcgtccgcacaaaatgcactggtcgggatcatatcggtaaaacggatttgattcatctttaggatacggtttttgatcgaacggaatgctttgatgattgattttcatttcctttacggtattatgtacttcgcagctcccattgttgtaatcacagaccgtgcagtacaattcatggttgtgcaaaatgttgtccatgcccataatctgcgcttttttcacatcggacgaaagcgtatcgatgacatctccgtcctttatttgcgcggaacacgaacgcaccagttccccgttaacattgacgatacaggtatcgcacgtttcaatcggcccgagactcggatgataacacacgtgcggcacgtcaattgaactattgttcaaaagctgcaaaacggtttggccgtccggcgcttccatttcaaccccattgattgtaactttctttgtaccagccattttcttttcccctttctgtacccctctatacatcctctatgattcccagccggcctttcactaaaacatctcgtttatctcatgaaacatacgggtatgagcggtaaaaaggaggcgttcacatatgttgaagaaaaaaacactcgccacgggattatcggcagtgatgctcacgggatgcgcattcggcgcagaagcattttcggttacacagcccgtccatgccgcagccgcttcaaaaacggaaaatcaacgtgcacaagaactggtgaacagcctttaccaatcggcgtttaaaggggaaatgccgcaaaatgtgagaggcctgaaaatcaaccaaagcacaagacaggacgtttacgataaaatcggcgagccggaacaaaaagcagacagccgcaatccatttgatttatacagctggaacatgggaaaccccggttatggattttcctatcataaaaacggaaaaatctcggaaatacgctatttcggaacaggggtcgagcggcgcttaaacctcggcagcgtcacacctgacgtcttaagcaaacaaatcggcagcgctgacaaaatcctgacagtgcccaaaacgggcgaaacagattacgtctaccatacggggcagtatgagctcagcttcgtcatcggcagtgaccaaaaagcagaccacgtcaacctaaaagccagataacgcaaaaaaagcggcctcccgggccgttttttcatagacagcttttccatcgttccttacaatacatgggagtacaaaaaaaaggggaacagtgtgaagtgaatagacatccattgacatacggaatatgtaccgtttttatcatcgccctcggtttgctgtccagaaccgcatacatcaccgccctattgcccggcatcataaacgcttatttaggagatgccttgtgggcggcaatgatttttacaggatccgggcttctgtttcggaacatccggacggaaacagccgcatttttgagcctctcgttttgctgtctgattgaatgcagccagctgtatcacgcgccttggattgacgcaatcagaagcagcacgctcggcgggctgatcctcggctggcaatttgtctggagtgacattttcgcctataccctcggggtatgcgctgccgcatttttagaatgggccgtaaaaagaaaccgccagtccccttcataatcggagcatgccgccgatatgaagggataaggaggtggaagctatggatatccctgcgttatcaatcgctatgcaccaagcatctctggcgcagaatgtaaatatcgctttaacaaaaacggtcatgcagcatgcacaggctgcggcggaagaaacagtgaaaatgctgccgtcccagcacccgactgccggacattcaattgatgtgaaagtgtaaaaaaagatgccggatgataaccggcgtcttttttttgcccgttgtacgtacaccatacctggcatacaggaataaggtaaacggaaccaacatttgaaaaggaggttttcctcttgtacgatcctttctatcatgaatacacagccgagagccacgaacgggtgccatatcattatccgcggccgccttattatttccccagaccatatccatactatccgcggccgccttattatttccccagaccgtatccatactatccgcggccgtatatcccgttctatccttggtattaatgttttaaaagaaatgaccgcagacaggaggcttcccctgtctgctattcaactttgaccgacagaatatacgggagagcttgaactttttccattactgccgctttcccgcttttgcttttcacccttcccttcacttcaagcaccgccttattcaattcataggacgtaataagaattcctttttcctcaagagaagttaaaatatcatgcatgacggctttctcctcaatcctgaaactgacagacaaagaatgcgccgccggtttaaacagaaaatttaacagttcaagcccgattaacgccaaaatcgtgccgctgatgccgatgacatacatacctgccccgatcgtcagcccgatgcccgacgtagcccaaatccccgcagccgtcgtaagcccccgcacgacatgccgctgcaaaataatcgtgccggctcctaaaaatccgacgccgctgacgacctgcgccgccacccggctcggatcaaaggacgtatggctgttggataacaaatcaaaaaagccgtatttggaaacgatcatcatcaaggcgctgccgacggccactaaaaaatgcgtcctcaaaccggcttccttcgccctgaattctctctccaatccaataagagccccaagcagacctgaaaccgccagacgaatcacaaaatcaagttccatccgtctctctcctttccttatcttcttacccgcttttacaccccaatcatgctgtgtatctttttttaaaatgcaccgactaattgacataaggaggttttatgaaatatattctgtggttttttatattattgttatttagcttatttattttgggaggatataaagcatctgtttctcacccggatttcccggttccattatttgctatgcacagcaaaacaaaggaatatgaaaaaggaaaatacgtttcaaactatacataccgtttcgcaaaagaagaagaaggtccgagcggtttataccaattggaaatagccgaaaaaggctggaaacttaaagggcaggaaggacttatcaaaacctatgaaaagcgaggagaacgtgtttcactttttttcggtacgggggaaataagcgtcattgaagaatgatccttctcaaaagacaggctgaaatccgcaaacggcatatcttttacgactccctttatctctgcgaatctataaattcaaccaatatctcaattaaggcgaacactttctaatccaaaaaatgccgccttcaatgagaaaatcattatacaaaaacaaaagcgcaactgaaaaagaataagcacctcataaaaaaagccctctttttaaaaagagggctgcagaaggaaacaggtaattatttatttatctaaagtgtattcattcacattaaaagtaagaatgttcccaaaaacaatatggtcccttctattttgaaaagggcctatattattatagtgcttctcgataacatatctagataagcctattccagaacttttttgatcataccatctgataaaatctttaatctcttccattgaaagatcaaattctttctcaagacctgtggtcattgtaacaagaagaattgcccgattactggcgggctgtttatttggtggttcgtcaggattctttggttctctatctttatcctcttcggtttttaccggagtaagagcatgcagatattctaatgcatatccagacggcgttagaccgccaaaaagataaagattgtctccaactgcggctattctggcatcatatctttcaaaaggatagggtttttctacgctaatttcatctttaattggatcatatacttttgttaaaggctcaatcacacttggattttttctaccgccaataatgtaaatcttattattaaggacagccgttgatgtattttgcaaaggtcctaaaaattttttacgattccatctatccaaaacaggatcatattcgtgaatatattcgtttagatcgcttctgatatgtccttgaactacttctttagtttgcccaccaactaaataaatctttccgttaaaaacttcagtttctgttgcatatatattaattgggggcgcttttttaacactccaagttttggataaagtatcaaaagcataatgttgcgaatgagcagcatcggtgtcgaatcccccaatcaaataaattgtatcgttaataacagcggctgatgcatggcaggtcggggtcggaatatcaggtgcacttccccatgtatttgttttagtatcataaacatctacagagctgtaaacatttgctcccttataaccgcccaatacataaatataattacctatcactgctgtacatgaacctaccctgggcgtgggtatatctaatccttgcgtccatttttgacttatggtgtcaaaactataatttttgttatattcttgattacgtgcacctcctaatacataaatggagttacccacaacagctgattcaaaagcataattaggttcaatcatatcaagtaatcttgtccacttttcatatttctctgtcaatttattcatccctctcatctttgtgataattctcatttatagatggcgatcatatgacaagagattcatttaactaagcgatccaagatcacttacttttgatcaaagaaatattgaaaaagcctctcaatttaaaagtgatttggttttcacttctcggttatcggccagcagtttactaaaaacttagtacataagagtaatatagaataacacctctcgatgaatccttaatgaagctcataatagcttcaatcaaaggcatatcacattaaagtaaagatcactctcaatccaactgcatctctcaaacagaacgtccggcaatcacctcaaaaaacgaggtgaaatctgtcagtatcccgtcatccgccagctgtttttcttcaaatagcgcgcggttttttccgagcgggtcaatggccataatcttgcctgcacctgcttttttcgccgctgtgagccccgaaaaggcatcttcaatgactaagcattcttcaggcctgaggcctaacttttccgatgcgatgagaaaaatatccggcgccggttttccggggaagctcccgtcatcaaacgtgactttgtcaaaatcaaaccaccgatccaactgaaagacgtcaaagtaaaactcgacattttcctttaccgtagccgtggcaatggtcattggcgtttctgattttttcagatggttcaatacgccggtcagtcccttcgtcagctttaactcatctttgttttcaaggcataattctctgtagtaggcttctttttcaaaagacagcttcttgatttcttcatttgttaaatcgccggaaataaaatacgtcaggatttcactgtttgttctcccgtgaatgttaacgaaaatgtcttcatcagaaatggttttcggcgcgtattttttcaccatgaaaaaccatgctttttcgtgcagatgcgaatcttgaaacatcgtgccgttaaaatcaaaaataacccctttcatcgaaccgcccgccttttttatttttttgcgattttgacatctacatattgctcgtaatgaatttgaacatctttcatcactttatcatccgtaatcagataatccatatcgtgcaagttatagaacacgtaaaaatcttcccggttgaattttttattatccgccagcaaaaatttcgtccgcgaattattcagcgcgatttgatgagcttccccttcttcaatgctgtaagaagaaatctcatcattatgtatgccgttggcgctgatgaaggctttcgtaaaattgaatttctgcagattgccgttcacgatgggcccgacgaaggcaccggtattttttcggaaatcgccgccaatcaggatggtgtcggcagtgtcaccatgctttaaaatatcaaatacgggatagttgtttgtgataatcctgattcgcttatgcagcaggtgtttggctaaaagttcaatcgtcgtgccgggccctaaaaaaacggtatcgccgtcatttacataggaagctgcgagttccgcgatcttctccttctcctccatttgaacacccagtttttcattatgcgataattcgtgatcaatggaataagaaatgctctgtgcgcctccgtgaatacgtacgatttttccggctttatccagctcgtccagatctcttctcactgtcatatcagaaacatccagttcatcgataatatcactcaccgtaataaacccccgcgagtttacgatatcgatgatttttaaaagacgctctttttttaacatgttcaatcatcccctcaactttacacacaatctaacacaccgcggcactctggtcaacaaaaacaaacactaacaaacaacataatcaacatataaaacaacgaaaaacttataaaacccctatgaaaacagatgttatttctttatgaagctattgacaacaaaaatgtatgcgtttactattaaacaaaagataacaattacaaacattaacaaacttcaattcacacattggcgaaggaggattcagtaatgctcaaattacctcatgactttattttcggcggggcgactgcggcatatcaagcggaaggcgccacaaaagaaggcggcaaagggcctgtggcctgggatgaatttcttgaaaaacagggaagattcagccctgatccggcaagtgatttttaccgccagtttccggaagatattaaactatgtgaaaaattcggaataaacggcatccgcctttctatagcctggacgagaattttccctgacggcacgggtaaaatcaatcaggaaggtgttgattactatcatcgtattttctcagagtgccataaacgcaacgtcaccccttttgtcacgctgcatcatttcgatacaccgaaaggattatttgaccagggagatttcctcaaccgcgcttcaatagaagcgttcgtcagctatgcggagttttgctttaaagaattcagcgaaatcagatattggagcacgtttaacgaaatttatcccacagccaccaaccagtatttactcggggttttcccgccatcaattaaaagtgatatcacaaaagtcattcaatgcctccatcacatgatggtagcgcatgcgatgaccgtcaatctttttaaagacggcggctatccgggagaaatcggtgtcgtccactcattggaaacaaaatatcccgccagcgactcagaagaagaccgccacgcctgttttctggatgacgcgttatcagtgagatttctcctcgacgccacctacctcggctattattctgaggaaaccatgcgggctctggatgaaatctgtgaggcaaacggcgcttcatacgagttttcagacagtgactttgacgtgatgaaaaaagcttcaacgcgcaatgattatctcggcatcaatcattatcaatgccatttcgtcaaagcgtacgacggagaaaccgttattcaccataacggaacgggcgataagggcacttcggtctataaagtaaaaggaatcagcgaaagaatttacaaagaaggcctgaagcggactgattgggactggctcatttatcctgaaggcatgtatgacatgctgatgcgcatcaaacgggactatccgcaatataacaaaatgtacattaccgaaaacggcatgggctataaagatgagtttgaagacggcatcattatggataaggcaagaatcgactatttaaaagtctatttagaagccgtcagtaaagcgattaccgacggagtcaatgtaaaggggtacttcttatggtccttaatggatttattttcatggaccaacggctacaacaaacgttacggtcttttttacgtcgactttgacacccaaaaacggtatccgaaagaatcggcctactggtacaaacttgtaagtgaaacaaaaacaatcatttaacgatcatacatggtgaaaagagtctcttttcatcatgtgtgccgtctttaggaggtttttttcatgacaaaggaagaattgcagatgctcggttttgaaatcgtcgcctatgccggcgacgccagaagcactttattgaaagtcctgaaagaagtccgtaccggaaacttcgaaaacacggaagcagcattgaaaagcgccgatgaaaatttaaccctcgcccacaatgcgcaaacgaaaatgttagctgaagaagctgacggcaaggacatggaattaggatttattttcgttcacggtcaggaccacttgatgacaacccttttgctccgtgatcttattcaggattttatagaactctaccgaagccgccgataaggagtggaaaaatgaacggtatcatcaagcaaatcgaaaagggaaaaccgttttttgaaaaaatctcaagaaacatttatttaggcgcgatccgcgacggcttcttaacggccatgcctgttattttattcgccagcattttcatcctcaccgccgctgtgccggaagtgttgggtttcacttggcctaaaagtgtttctgaatggctttggaaagtttataactattcaatgggcgccctcggtctgatcgttgcggcaacaagtgcgaaatgcctgagtgaatcaatgaaccgaaaaatgccgaaaaacaaagggatcaaccccgtttcagcgatgcttgcttcagtcgtcgggtttctcattttaagcgtcactcaaatcgatggcgggttctccacggaatacctcggcacaaaaggtcttttagccgcttttgtatccgctttcataacagtgaacgtttacagattctgcgtgctgaaaaatattacgattaaaatgcctaaagaagtaccgggtaccatttcacaaacatttaaagatgtttttccgttcgctttttccgttttggccatggtgatcgttgatttattgatcaggaacacgctgaacgtatcgtttgcagaggctctctcctctctcttatcgccgttttttaccgccgcagacggttatctggggatttgtgtcatttggggaatgatggcgctgttctggtttgtcggcgttcacgggccttctattgtggaaccggccatcgcagctattatttacgcaaatgtggaggcgaaccttcagcttcataatgccggtgagcaggcgtccaacgtgctgaccgtcggactcgggaacttcgtcggcacaatgggaggaaccggcgcaacccttgtggttccgtttatctttcttcttttcgcgaaatccaagcaattgaaagcagtcggaaaagcatccgcggttccggtgtctttcgcagtaaacgaacctctgctctttgctgcgccgatcattttaaatccttattttttcattccgtttgttgtaacgccgatggtgaatgtctgtctgtttaaattttttgtggatgtcatcggaatgaacagttttatgtatgttcttccgtgggccaccccggcgcccgccggcttgattctcggaaccggcatggggctctcggcttttgtgctgacagctgtattaatcattgtcgatttcctgatatacctgccattctgtaaagcttatgacaaagtattagcggcgaaagaagcccaacacaccgagcctgaaaccgcgccgcaaacattacagcccgccatggccggcgcctccgaagacgcgtcctccgtcatcagcacaaatcttcaggaatcctcatccgccttggaacacagcaccaatgtgttagtgctgtgcgccggagcgggaacgagcgccatgcttgcgaacgcactgacagaaggagccgaagaatataacgtgccgattaccgcctcagcaggcgcctacggatcccattacgacatcatgaaagacttcgatatgatcattttggctccgcaggtcggctcttattacgatgacattaaagaagatgcggaccgcctgcaagtgaaactcatcgcaacgaaaggagcagaatatatcagcctcaccagaaattcacaaaaagccattcagttcatactggagcatacctcaaaatagaatcggaggtttatcatggaagccaaacttttgaaatcaagattcgaagacattttcaagagaagtaacggagaactgtttttcgcacccggccggatcaacctgatcggggaacatacggattatataggcggccacgttcttccatgcgcgatcacgatcggaacttatgccgtatgcgcaaaacgcggagatcaccagatccggttatactcagaaaactttcctgacagcggcattgtctgccttgatctttccgccacagcatacaaaaaagaagacggctgggccaattatccgaaggggatgatccattaccttcttaaagccggcggccaaatagacagcggaatggatattctttttcacggtacaattccaaacggagccggtttaagctcctccgcttctattgaaatgttaacaggttccattttaagaaagttattcagcctggatgtttccgatactgaactggcgcttatcggaaaaagagtcgaaaatgaatttatcggcgtgaattcaggcattatggatcaattcgcagtgcaaaaaggcaaaaagaacatggccattctgttaaactgcgataagcttgagcacgaaatgattccggctgcttttaacggatataaaatcgtcattatgaatacgaacaagcgccgggagctggcggcttcaaaatataatgaacgccgcagcgaatgcgacgaggctctttcagaactgcggcaatatcggaatatcgcatcacttgcggaattgacgtcagaagaattcaacgaactcgaatcccttctctcctgtgaaactttgcgtaaaagagcccggcacgcggtcaatgaaaacgagcggaccctctcagccgcggaagctctcaaatcgaatgatttgaaaacgttcggcgagctgatgaatgcgtcccaccgttcgttacgcgatgattatgaagtgaccggtgacgaattagacgcgctcgctgaagcagcctggaaagaaggagcactcggagcgcggatgacgggcgcggggttcggcggctgcgccatagccattgtggaaagtgaagaaaccgccggctttatccgggccgtttcatctcactaccgcagcaggacaggtcttgaagcttctttttacatcgctgatataagcgatggcgcggctgaatggaggggaaaataaatcatggcgattctcgttctcggcggagccggctatatcggttctcatgcggttgatcaattattaaacaaaggattgaaaacgatagctgtggatcatctgcagacaggccaccggaaagctgttcatgaaaaagcagttttttaccatggagatatccgtgacaaaccgtttcttcgctctgtgtttgcgaaggagaacgtaacaggcgttctccattttgccgctcaatcccttgtcggcgaatcaatgaaagaccctctttcatatttcaataataatgtgtacggtacgcaaattacactggaggtcatgcaggaattcggggtgaaacacattgtgttttcttcatccgccgctgtatacggcgaacctgaaaaagtgcccatcacagaagacatgccggaaaagccggaaagcgcatacggcgaatcaaaactcatggcagaaaaaatgctgaagtggtgtgaaaccgcctgcggcataaaatatgtctcgcttcggtattttaacgttgccggcgcgaaaacggacggttccatcggagaagatcatcatccggaaacccaccttatccctatccttttacaaaccgcgctcggtcagcgcgaggaggttttgatattcggcactgactatgatacaaaagacggcacgtgcatccgcgattatgtccatgtttccgatttaatcgatgcccatattctcgctctggaatatttgcaaaacggcggagacagcggcattttcaatttaggatcaagcagcgggttttccgtatcagaaatggcggaagcggcccggcaagtgaccgaaagagacataaaagtaagagcggccgcaagaagacccggtgatccaagcaccctcatcgcttccagcgataaagcgcggaacattctgggctggaatccgaaacaaacggacatatcggaaatcattgcgtcagcatggaattggcatcggcaacatccaaacggatacaaggacaaatgaaatggaggcggcggtcattgaagtttttgaatcagtggcagggtttctgaaagaaagcactgtcttaggcgacataaatgaaacagatgtgatttacacaagaaacagacttctcgatctgctcggactgacggattatgcagaaccgaagcatatcaagaaacaaaacaggcttcactatttggacgaaatggtgaaagacgcggtaaaacggtcaatcattaacgatacgccggctgaaagagacatgctgggaagcagaatcatggacgtgatcacgccggccccttctctgatcaatgccgcattcagcaaattgttatcagattgcccgaaaaaagcaacagattacttttaccgactgagccaaaacaacgactatattaagacgcgggccattcgaaaaaatatcgtgtaccgctcaataacaccttttggggaattggacatcaccattaatttatcaaagcccgaaaaagaccctaaagacatcgccgcggtaaaaaacagtccggaaaaccggtatccgacatgcctgctctgtatggaaaacgaggggtatgccggaacaccgcatcaccccgcccgttcaaatcaccgcatcatcaggcttgacttagcgggagaacagtgggggtttcaatactctccttatgcgtattacagcgagcacgctatctttctttcaagcgtgcacaagccgatgaacatcagccgtgacagcttcagaaggcttctggccataacggaaatcttcccgcattatttcgcgggatcaaacgcagacttgccgatcgtaggaggctccattctttctcacgatcattatcaaggcggcgcccatgagtttccgatggcaaaagcgggttccctctacccttttcatatacgtcattttccagacgttcaggccgaagccgtgaagtggccggtatcagtgatccgccttcgcgcaaaagatccggatttgctgacagatgccgctgcgtatgtttttgaaaagtggcgggaatattcagacgaaaccgtcagcatcatcgcaaagacaaatgaaccccataataccgtcaccccaattgccagacgcaggggaacggattttgaaatcgatctcgctctcagaaacaaccgcacctccgaaaattatccggatggcatttttcacccgcatcaagatgtgcatcacatcaaaaaagaaaatatcggtctgattgaagtgatgggactcgccgttttacctccccgcctgaaagatgagctggcagaagtgaaaaagtatttactgaatgaacctcatgacatcaaagacattcatcttccgtgggccgaaaacatcaaagcggatgaagacgtgacaccggaaaatgcagccgctgttttacaaaaagaaaccgcgaatgtatttttacgcgcgctgaccgatgcaggcgtttttaaaatgacacacgaaggaattcaggcgtttcagcgtttcacgacgttattggagaatggcagctgaaacattcagagtgaaatcaatcaacaatcttttttatcaggaggtattgtgatgttcaaaaaccgattgaaacgtgtatttgtaaacgcaatctgtctttctctcattttcactgcttttacattctttgagaagtctcctaaagcaaaagcggatgccccgtttgcctatggcgctgatataggatggctgaaacaaatggaggacgaaggtgtgcgctggctggatgacggcggaaaacagaaagatgccttgcagattcttaaagatcacggaataaatgccgtgagactgagagtgtttgtgaatccgccaagcagctattattggctgaaagacggcacaacatggaccatgctcggctatagtgacaaagcgggcgtacttgcggcggccaaaagggcaaaagcgttaggaatgaaggtaatggttgacttccattacagtgatgtgttcgctgatccaggccaccagatcaagccgaaccaatggaccggctattcaaacagccagctgcaggcagccgtgtataaccatacgtacgatgtcatgaaagaacttaaaaatcacggcatctcccctgattgggtgcaagtagggaatgaaatgaattcaggaattttactgcccgacggcagcacgaacgatttcagcaaattgaccgccttactgaacaaaggctatgacgccgtgaaatccgtcagcccggccaccaaggtcatcagccatttggcacacggcacggacaacagcctattcagatggtggtttgatcaattctttaaaaacggcgggaaaaccgacattatcggcgtttcgttctatccctattgggaaggtaagccgtactgggagctcaccggccatttatcatctaatttgaatgacatcgcctcacgctacaacaaggaagtcatggtggttgaactgggcggagatgaaaataatccgaaagattcctactggaccataaaagacaccataaaactggtgaaagccgttccgaacggcaaaggaaccggcgtattttactgggaacccgaagctcactccagcgttctgtcagacgcgtatccattaggcgcaaccgccaaagtgtctaaaaacgtcttgaaatacacaaccgcaatcgacgcttttcatgatgccgcaacaggaaaatgattgatgcgaatctcaagcaggctcattgcgcagcctgcttttttataaggctgtagtgctggcctgttatgaaacagagcaagtaacgaatacggaaagaaaaatacccgaaaaaccacgtttcggttaaaaagccgctttttaaatagaatactttttctatccccctccttcttaatttctgcgcactatctctcagttcctaaataataactttacgattgttgaaaaagaaacaaacattttataatattgtgtaagcaccaccgagcaggaggacgggacatggacaaaaaagaacagctcctcacggatttcagggacttttttaacaagatggtgtggctgaataggctgaagatggaagaaagccttaaggggcataaaccttctgaagtgcattgcatcgaattcatcgaaaaaattgaagacgccaatgtgacaaaacttgcggagtccctttatatgacaagaggcgccataagtaaattaacgaagaagcttatcaataaaggccttatcgaaagctatcagaagccgcttaacaagaaagaaatctatttcaggcttaccgaacaaggaaaagtcatttataaaattcacgaggaattgcacaaagagtttcaagaacgggacaaaatcgtgtttgaacaagtaactgatgaacaatttgacacgatgctgaacttcgtggaaacatacagcaggcatttggattcagaaataaagaaacttggtgcagacatgaaatcggaataaatatgaataaaaccataggcagcccttctccatgaaaacgggctgcctttttatatccctcttattgttgacaaagaaacaaaatcactctattattttgttgacgaggaaacaaagacagcaattttgagaggagagtaatatgtcaacacataaaagaaaggaacttcgggtgccaaaagaagttctcacagccgcctgggctattgcactgggagcaatcgctccaatgcttgactctacgatggtaaacatcgccatcgacaaactgaccaaagacttcaacacgacattggataccattcagtggtccgttacaggctatgtcttagcacttgcgattgcagtacccgtatccggctggcttatgaataaatataacggtaagaaaatcttcatcggctcagtcatcgcctttggtgtcatttctgtttttgcggggatgagccgtgacgtttccagcttcatcttcttccgtttgcttcaaggattcaacgccggcattataactccgcttatgtcaacactcttggttaaaacggcaggtccggaaaacctgggaaaagtgatggcaatcgtcagcacccctatgatcttcggcccgatcttaggacctgtcatcggaggcttcatcgtccaaggcgcttcatggcattggattttttacatcaacgtgttcatcgttttgattgctgcaccgcttatgatgaaaaccattccagactttgaaccattcaacaaagatcgtaaactcgatattttcgggattatcaatttgtcattaatgagcgcggcattgatgtacggtattacgaaagcggcggatcatgcatcatttaacaatagctacaccattttatgggcgggtatcggtcttgtttcagcagccatttatcttgtatataatctgatcaagaaaaaccaaaccgtgctgcctatgaatttgtttgcaaacaagagcttcttagcatcttcgatcgggttgttcttagcgaatgttgccatcatggggccgatgttaatacttccgctgttttttcaaaacattcgtcagttcacggcagtcggagcagcactcgctttaatccctcaaggagtcggaatgctcgtgactcgtccgctgatcggaaaaatgattgataagatcggtgcgaaatacgtggttacggtcagtcttgttctttcgctgatcggatctatcccgcttatttttatcaccgataacacaagtatgatttggatttccgtcgtattatttatccgcggcaccagttttggaggaattatgctcccattgatgagtgacgcttatacaggtcttgacagcaaacagcttccggaagcaggtgtcggtattcatatgattgaaaacctcggttccagctttgggtcagctgtgatcgcaaccgttaccgcaactgtcatacaaggattgcagccgacgattccgaacagtttaaaaggctaccatgccggattcttagtatccgtcatcatccttgcggccatcttcgttccaagtctgttccttacccataaaaagactgcgatataaagaactttttaaagtaaaaaacccttgcacagcaagggttttagtgaatgaaactgatgatggttgccggcagagtcagccaacaatagacaaagccttttactcattcacattgcttttcattaaccattctacttccgttaattcttgtttttgaacgtcttttgtatgttttttcgtaaaatggactttaacagcttcttcgttttcccaaatctcccaaagcatgattttgcgttctgatggttcgagcggataagcatggaactgaatacagccttcttctttgttcgtttcttcctcaagttttttgaactctttcattatttcattaaggtctttatcactgatgatttttaagcatgccgttatgtaatgcatcgaaattccccctcttcccatctttttatgactttacattataacatttatcgaaaaacgaaaccggcataccgcattctcaacatataaaaaaccgtccataaaaaatgaacggcaatgtttatttaagagcatttagaccgacttttgcagcctcagcgataagagcattattataattggcatcttccgtaaaccggtttgacaggattgccaaaacaattggggctctgtcaggcggccaaacgatcgcaatgtcgtttcgtgtgccgtagcttccggctccggatttatcgccgacttcccatcctgcaggagcgcctgcccgaatcagttcgtcgccggtagcgttgccccgcatccaatctgttaaaatcgtgcgcttgtcagccgtgagagtgttacccaaagcgaaagtcttaaggtcagttgccagtgcttttgcggtgcttgtgtcacgacgatccccgggaatcgccgagtttagatccgtctcgaatcgatcagcttttgttacatgatccccgatctgtttcaatgacttttcaaaacctttggggccgccaagctgctgcagcaataggttcccggcggtattatcgctgtaacggacagcggcttctgagatttctttcaggctcatgcctgtatccaggtgtttttctgtgattggagaatatgtaactaaatcgtctttgctgtagcggatgatagcattaagtttttcatttgagcttgtcttcagaacagcagctgcagccagaactttataggttgatgcgtaagcaaaccgttcattcggccgataggcgattgtcttgtttgaacctgtatcaatcgcataaaccccaagcctggcatcaaattttttctcaagctgaacaaatttttgattcgttatacagcttgtcatttttgtgttttctatagatttcgcttcagcatgcgctgagccgaataaaggattgaaaccggtaaagcttaaacataaaagtccaatgcatagtccaacttggattcccgctttatttttcacattcaggcctccttattataataattttgtatacatcttctaattaacattacaaacaggatgaaagtcaatatatttcctgtgagatgattaaatcctgcattctgactcctccccttattaaatgcgccgccctcgccgcgtctgaatgtttgcatgtccgcttcgtgttcatcatctatttgctatccctccgtgcaaataaaaacggacaccaatcagagcatagtgagctgtgcaatgatcagtatccgcaggctttccgtcttggacctatatatgtttctcttacagactataaaaatcataaggtaagttaacaaacgcattaccttaatctcgtcagtcaaaaaattatatcattttatatatttcaataagattatcatctggatctctgaaatgagccactcgtgcacgccattcctgacgatcatgtggttcattgacgcatttaatcccttgcttgtgcagatagtcatacgttttatcaacatcttctaccttaaactgaagcaaaaatcttgattgcgcatctccgtctaaagattttctttcttctccaactatttcagccatattttctcgagataaaagctctattttcgtttctccattatcgaaaagtgcatattccatttccttctctaaccaactgattggaagtcctaatgaatctttgtaaaactcgacgcttttcttaaagtcattaaccaatagtctaatttgcagcaacttcatattgaacgcctcctatcattttactggccattcatttaatcatacaatagggacctgacagcattatgtcaagtttccataaatttttttccatactgcacctgaatttcggatgaaagccttcggagattcatgaaactgcgtttgatcaattcacattcttggtttgaattttccttcacttcaccgtggaggctccggccgtgtaagtcgcgcatccgtaaacatccggccgccgctcctgtaagtaacacaactgataaatgattgactgaatcgttttttcaccgtcattgcttcccctgttttttgtattctgcgatttccctaggggtagccttccggactccgtctgtgtctgtcctgtttgccacttgaacgccttccatgttttttatctcgctgactactcccaaatgctctaaatacacatgatcaccaatcttgaaacgattcagtttagcccgctcctcagtcatgctcctgtattcagtcgcggctttcatttttaattcagccagacacatttgacaaagggttactgttacagaattgccgttaaaatcagtaaacgaaaccgctctgacagattccttttccgggtgcatcgtgcatgttttcttcataggtgatggccgtgtaaattcaatcattccgcttcctcctccataaaagtcttttcgtccctctgacataactcccgatgaacgggaagttccatacacccgcattcaaaccgtcacaattacatggaggttgccttcccttcgccgtctgacggattttcatacatcctgcatagctgtaagcctatattcctttatattcccaatgcttgccgcacttccctgttaggatgaaatttctaaagctgtggaccagttgccgcatgttggttccatgcgacaagcctttgggcagccatatcccaattcatatgggtaaatttcagccctctaatatgtgtgtatgctttttaaaggaggtgcatcacatgatgttctaacaaccgattcaacttaaacagagtgatttagtcgacaaaaagatttgtcgagaacaaaaagaacggtgaatctaaaaaacaattgatctttctgaatatgaattgctagccaacgcatattccaaattaataagataaataaaatagaccccctcaaaatggtgagggggcctgtggccgatatttctttattgaactccaaacgaagagatgcaaaaatggattgaagaggtgatgattttgccgccatgttaatgtacaaatatttaattaaaaagggaaagaattaaataaggggttagattgtttcaaattaaggtccttcagagcgatggagaagaaacataaagaacttgcttaatgcggattcttcgactttgtaagtccactgcaagaaccattttcttttgtcaccttctccgcaacctttttaatcacacccaacaactcgagcaaaagttcattgtcgtcttcttccaaagttattaaagaagagatatgttttttagggatggcaacaatatgcactggccaaaaaggtcttgtatgatgatacgccaatacattctcggtttctaaaactttatttacttttgtttttccgcttaatacttcatcgcgatgctctactttatttttcacctttatcattaaaataagagaaccacaataaacttatgaacccagcagctcctataattgtagatattatataagtccaattaagtaaatccataagctttctcccctaagaaaaattcagatccctctaaataaaattcgtattttataaagacattatcctcttaatagaggtcatgtcagttatttgtattggtaataaacacccttcttgtttagcttatcaataacttcgtctttgaatggtatatctccgattattgcatatctaactgtatagttacctgctttgatatcttgaaaagacagattggtttttgttttcttggtttctgcttccggttggagtctaaatagtaaactccttctgtaatctttaaagtcgtttatttcgcattcattgacttttgcaaaatgttcaattaatcgttccattttttccttactcgaatacaattgtgtgaaaccaaagtgatgaaaagcgtgacagtttgcacaaattaaatttaatccacttaatgtgaccacaatattttcaaagtcatagtcctcgatctcgtgaagatgaagattccgcatttcgtctggttgaggggaaaatccacaaatgctacatacaggtgtatccttttgtaatatgtgatccctgattctataccaaagtgattgaccaactgctttccttacagttcttccatgaaataaagaaggttttgcatcaatctttagtttgaagtttgagtatttatccatatgtctccctttaaaacaattatttaatttcaatgtcaaaaatttggattccaagcaaattcaatgttgccttctgttcttacaactaaatctttgcataatctctccttgttgaccttattttctttacagttgaaatattgagcttgtgcaataaagttatcattacttgacattataaattttttacggtcaccccttcttccaaattccttgaaaatatctataaatataacatctgccggcatcttaccaaactttttatcgtgtgtaatctccggaaaattttctaaatttctaactttgcttatgatttgttcaatgttctttttcacatgatttcggcgcttggtattcttcatatagacctcaagtttaaaccgttttaaattgtttgtacttgtgtctttaatattctttacaatatactcttcttttttaatatcatgataataacactgcaaagtataatcttcgctaactgtattatcttctttaaaattcaaaccaaaaagactgtttccactaattttacgaactaaggactgtgcatctactttgttttgaataaatgcaataatatctgccgtttcagtaagtaaaaaagaattaatttgtttatcgttattaaatgtaaggaatagcctctctgaatcaggataaagtatagctaatttaatgaaggtaaagataccgaattgcaccaattcatcattcgaaggaattacatcagtagaaaaatagaggttgacttggttgattacatcatctatgtccaaaagatggcatcttaaattataggtagacatctcaaattttatccaggattgaaaaacaatatcggttttatttaaaccaacagcctgaacaatacccttataattcttcacattaaattttataatgccggccagtataccattaaccaaatcaattattttgtatatctttctcctgaattgcgaaacacttacttccttactttggggcttacccccggtattaaagttaaagataattgtacctttctcttttagatatgtccctccatgattaatggcatttctaatatctacatcaatttcctctgttaaaattgtacacccttttgatttaagtaagtttactaagggtcctagattattttggcttaacaagtctttctcatctatagtgttaagcaaatttctaagaaatttatatagattcccgattactccttcaactaacgaattatataatggcaaatacttgacttgaatttcaatgtctctaggtattattgttttattaaataaattcagcgtattcagtacacgatcatatgatgaaaggcttaaaaaaaagtgaccaagactttctctgaaactttcaaaaaacaaaatagtgctatcattcttatattttacttcatcaattaaattgtaaataaaatctttaatatctttatcccaaaactttttttcctcatgaaatattaaatcataaattaaaggaagccatgttttgggtatatactgaagctcctcaatatcttcttctattctttccatgtacccctttaaaactaattcactatcaaaacccataaaatctaatgactcaaatgccgtttcaatgtattcacggttcaactattttctctccccattccttattccaaaagtatgcgaacttgcaccttctttatcatgttctgtcttataccttatttgctccctatattccctttgtatttcatcttttttcttatccatcttacttgacccctttcaaaataaagtaaagccaagcaattctgaattatttttattcctttcttatgactcttaatttaatccattcttcatcatcagattatggttttttggttgttctataccactcgttaaaatgagcaactaactgaaccattattttcttagctcgtcctttagaacccatgcctaattgcgtaaattttgctgtttagcggatctccatccccaggcttatcaaactgtattagagcaatgtagtagctcctcattctatgccaaaaagtctatagagccgccaaaatgatctcgatagtggttaacataaatttaggtttaaaccccttggattttaaataagcaggaattgcttaagtgccaaattcttgtcctatttgacctttttccttaagcacacactataacgatacttcactcactttgtatacaattttcatcctttaatgctctgctttattttcacttttgttattaagataagaaaaccacaataaacatatgaacccagcggctcctataattgtagatataatgtaagtccaattaagtaaatccataagctttctcctctaaaaaaattccaatacgtctaaataaaataattatttcataaccgtaaggaattttaacattttatgttttttcctgattaataaattctttattcttcctcaaatttatttattctgcttaacattctcctatcatttttcgaagctctcttcagcgatcttttctcatatgatgtccctttagtaatcacaacaaaatcagaattattttgcacataaacttgggagtcagatgattcatagtaacccgtaacattttctaaaaccgtcttggaattgtctttatgatatagatcatagttgaccggcggcctgctgattgcaaatttcccaaaaacagcaacatcatccttaccgggagtatggctcgctcctttaataaatatgacgctaaatattaaaatcaaaaaaattgcaattaaagttcctgcaaacataaatttttcatttcttttccagttcaacataaacacccttttctttatcatgccgtgttgatataagtaaatttcacaatttatgtactaacaaatttaaacaagcagcttccattcaacatacttaaatcgctgctgataaaggtcttccaggattgatgcccattcaccccagccttccgcaacaatgcttttttctctccatcctcaatccgttcacttcaaagttactcactcttccgaaagtgtttttacttagagctcagttacttaaccacaactttctgtacaagaatagagtcccaaagccaaaagatcagagcaaataatacgctgaataaatatatctcataactcgctagtatagaccctattgggttataaggttcaaagagaacggtcatgattagccatgagttaaatgaaaatactgtgtatattaaaagatatttaaaattgaaccttctaggttttcggtttaagaaaagctgcaatggcaattcaaaaattaaataacatgtcaacatgatcccgctaattataagataaggaacatattcggcttgatgcagggtgatcacatatatcagtgtagaacatatggccgacaaaataaggacagctaggtatcttactaccatcaaatctatctcccccttacgattaaaaaacaaaaatgcttgcaattgctatttttcgtaataataagatttgacccaaggatagattctgcccttattttcacaccattcaacaaatccctttgattgttcttctttaaacaacatccagtcattcaacaaatcttgataatagttaagttgttcgttattgctttttcttgtttgttgacattctatcttgttgttcaactgccgggacttagtaagaagtgcttgatcttctttaatatcgcctagatataaatcttcggatatgtgatgaaatgaataccacaaggcgttcaaatgaatatcgattaacgttaataaagataattgttcattacttccacctagtctaagtgcattattcaagtaatcgacacggttttcagtatttaaaaacacaccataccacctgtatggtcttggatcttcggggttactcttcatccatgcttcaagcagaggctttaaaaaatccatttccaaagggtgaacaagtatatggtgaatatcatctgatttttctaataaagcaaatagccaacaagcaaaattctgttgtgcatgattttcccacgtcttggcttcatcgataaacgaagataatgctttaagggattctttacgtaatcctttttctttgagaaagcaaaacttttcaaatgatgggtattcatctaatctgtcattttttaagatattagttaagatatttatcattgttcacatctctctttgtctagagtaaagacgtgtttatacttaaaccatttgaaacacggcatacaatgcaacttcagctacaaacaaataaatcatatatctagcataatttaatacatcttcatcagtatttttctcttttttaaaagtccatgcaaataaccctaatacagttgccactaatgcgatttctattattgttaatattgacataccttcctcctaaaaagaacagggtaaatagacttatgttaattttcatttaattaagtctcttcagtcaggatttatcttataaaaactttccatttcttcatgttcatcaccttcaatgagttcaaagctgcctggtacattatacattattttccgttaatatatcaattccggttaataaatcacctgcatcttgaattacgccattttcatcttttacacactacaattcattatctaaaaatatgctccaaccttttaaccgacttaatctttccaattcattcaaacgctaccgagtaattcctgcactccggtttcccatccataagctctcttctcaaatgcttaatcacataattaaaaggacaaagaagtgggtcaaatgattcattttaccattttagatagtacattgaccttattcctcattcctccatggtaaaatcttgttgaaacatttcgaatgaaaggatatggtcatgaaagttttcgaagcaaccaccatcctcgccgccgctaaacagcgcgcgggtgaatataaaaaactgcgcggtcagatgatcaatctgaaaaaagcgtttcaaggcatggctgatcttggtgacaatgatttctccggccggggcgcaaataatatcaaagcttttttcaaggaccaagcaggcgtcacagacagctggcttgatctgatcgatatgaaaatcgcatttctcacaagcctttccggcaaagtcgaagacgcaggtctttccgaatcacatgtagaagaatcttttcttgagcacgagctcacccatgccctcagtaaatcaaaggcgattatggaagagcagaaaaaggacatgcgctccatcctcggagagatcgaagacatcatctcgctcgaattattttcaaccgaaagcacggatcagaagctttcttcagctgataaaaaaagaagcgaaacgatacataaactcggcaagcttgatcacgatctaacgaaagaatacgcagaaaccgaagcaaatgaacattttatccaagcagatttccagcagcttcaaaacgcaacaggcaaaggaaaaagcgccacgccgcttcactacaacgccaaggcataccgagaaagcgacatccataagaagaaaggcgatatcgcaagacattcggatgcttatttggcgattaaaaaggaagaagcgaaagagcgggaaatcaagaatctgaagaaaaagctggccgatggtgtcaccgatccggatgagtatttggaaatcgcgaagaagatcggctatgaaaaccttgaacccgctcaggtgggatatgtgatgcagcttgaacaagcaaaacagctcgaagaagtcggagaaacggcttgggatatcgtcaaaggaataggcgtcggcctttatgatgtcgggaaagacacaataaccggcgtcaaagatctggctgtcggcgcatgggatttttaccatctctctgatgaacaaaaagtcgctaaaaccatatcggctgtattgaacacaccctcctacgcaaaaatcatatggacaaacctggcggattcatggaatgataaaatggttaacggggatgcgtattcaagatcacattacatcacctacgccatcgggagcattgtcggactcaaaggttccggctcagccgtaaaagtatcaagcaagctcgcgaaaacaggtgccgccaaagtggataacgtcttggaaggtggagaaaaagcggctgcaaaacatgtaaaaaccgggattgaaaaaggacaaaactacatcaattccttttcgaaaaacaagtacgaacccgcgcttgccggaatagcacaggatattgaaaatactcacaatgtgaagaatacccctttgttgaaaagtattattgaagatcagaaagagagtgttctcagtaaatctgtgacttctgacaataacggcatacatagtgttaaacaaggagacagcagtcctctcgcaccaggcggtggcttagctgctcatgaagcaaaaggcggacaccttatagatagacatgttggtaagactgatgaagagttattacagaggctacagataaacaagaagatacgggcctcttctagtttcactgataggccaactgcagaaagagtcgctaatgaaacattaactaaacataaaaaggaaattgaagagtggttaaaaagtgatgttaatgatccattaccgttaccttatagaggaaccgaagttataggtagaggagttcgtaaaggttcaaatgaagttaaagatatgactaatgctagaatagtattaaagaaaaatgaagatggtagctttatactaacaggctacccaacgaggtgatatataatgattgagattaaagtttctgatcctgtatttagatttctcggtggacatttccaccaagatatagagtctccggaaaatgcacttgatgaatatttaaatgaagcatcacaaaaactaaaagaaagagatttaatagcactaactgagtttgtaaatagtgatcattcagaagaagacaagaatgaatttatagaagaagcagcggatggcatatactttccagaagatgatataacaccattagaatggcttaagcaagtcactgaacaaattaaaaaacaccttaaaacaacatagttagaaaaagagccctcttttaagaagggcttcttttattaattcaatttcgctttcgtttttggtccgtaaatgccgtctggcttcaaaccatacatgagctgaatcgtactgaaacgttcagccgcatttactgatgtaagtgcatttgaataaattgcagaaaaaccctcctcgtcttgagaagggctctgacttatacttctttttctctaaatcagttcgaagcaaaaaactgatgccgctcaacttttcaatcgaagtgcttctcgggttctccaactatttgcccctatgcttttcttttgctttttgttttctgattaaatatttttgttcctttattttttctctttattttctattcagttgtttttttgtttcaagctcctgttttatcgctttttatgccttagttgatatcccgatatttttcatctctttagaagcttgtcgttgcaatctttttgggtttaatttcttagattttgctttaacacaaacctcttcttgtcagtgtgggagagagtctgtaaaaaaggaaagggtctccgcttattttaacaacacttcaagttttactttggttcaagcgcataaattccatcagcttttaatccattcatcaattgaaatcgaattactgcattcgctgtcttcgctccatatgcaccatcaatcccgaagttctttcgctttaatgaagggcgacagcgccgttcgaatctgttttacgctctcccctcggattttaatgggttttcaactttaaaaaaccggaagacaagaggaaggatgctttcttgccttcagatgaagagccccctgaatcacttctttatcatcgacggcaaaatgatagcttgtcgattcgctgttacccgacatataactgatttcattggcggccgcatgcgtcatttcctgtattgtgaatgattttcggagtgccgctgtatttgccataaaaaactaaatattccgtttttcaaatacaaaaaaacagctggattaaccagctgctgatcgttatcactttagccgctcagtgatacgaaatttctgtatttctctgaaatgaacaggtttcggcaaagaccgccgccttaaaggcgatgtttatctcccttgcagtatacagcgaatgtacttcaaaatcagcccaaaaagcagttccggccccaattcgcccctcgatgaatgatgacaaaatcaataaataagcattgtgggactcaaaggttccggctcagctgtaaaagtatcaagcaagctcgctaaaacaggtgcagccaaagtggataacgtcttggaagccggagaaaaagcagctgcaaaacatgtaaaaaccgggattgaaaaaggacaaaactacatcaagtccttttcgaaaaacaagtacgaacccgcgcttgccggaatagcacaggatattgaaaatactcacaatgtgaaaaatacgcctttgttgaaaagtattattgaagatcagaaagagagtgttctcagtaaatctgtgacttctgacaataacggcatacatagtgttaaacaaggagacagcagtcctctcgcaccaggcgggggtttagctgctcatgaagcaaaaggcggacatcttatagaaagacatgttgggaaaacagataaagaattaatagaaagactgaaaactgatcctaacccacatattacagcttcatctacttttaaagatagggctaccgctgaaagaattgctaattcagttttaaacgatccaaaaaatataaagaaaatcgaaaattggattgatgatcctaaaaaacctaaattaatgttaagatacaagggcgatggagaaataatcggcaaaagcgtatcaagaaattcagaactagtagaaaacgttacaaacgcaaaaattatactcaaaaaagataataacggtaactttattcttacaggatatccaaccaaatagaaagagaggaagtatcatggatgaaaggtatgatttcttagatgaattagaaaattttttaggtgcaacatttcatcaagatatccaatcccctgaacacgccttagacgaatttattgaggaaattagtaaagaaggtttgctatttacagtaaagtattgcgaagagtttctaaatagcgatctaactaaagaagaaaaggaagacattataaagtgtaatgcagaaatatatttcccgacaattggcttaccgcctatagaatggttaaaaagtgtaatagaacaactaaaagaggctatttaaaagaaacactgaaaggcccccattttatggagggtctttttatattgataccgaagtttttggctttcttatccggatagaaatgcaataccgacagtgcggtttggatctacttgacggcatcactagctgaacttttcaacaattttgaccctaaaaagagatacggacaataaatttctagccaaaaaatcaagttcgccaacaacttacgaatttgataaaccggctttattaagggaaattaaaaaacccttgcgtagcaagggtttcggctatgattccgactgggctcgaaccagcgacctctaccctgtcaaggtagtgattatcttctgagctgttatttttattcctgacaaatacttatccatcaagggattgcaaatttaggatctgatcatttctgattaaaaataatgattgttggcaggtttggacaacagctcgccaacaattttccactttaaaccagagattaaattcacaacatattctccgttgataaaaaaatttttgctacaaggaattcttttagactttcaatttttggtttactttcttttcgttaacctttctgagtattgcagttgcaccttcattataatcatgtattagttgaggcataattctcctatacttatgaatattttcactttcaagatatttaaaatcctcttcttctttttctttaagatagtttaagaataatctaatattctcaattcttttatcccatttctctttaaatcctttatgcctttccatgtaaaatttataattactaaatattttttcaaataaaatttcatcttgtatctttgtatcatatagtatcatttctaggtactgatgattacaaagtaaagactcgagatgatattgtgcagatggagctaatcttacaaaactaatattctctaaatagttttcttcccccatttttcttgctcctatatcactttcaataatgtgccgttcaagcatcggtgccaatatacgtcttaaattagttagctcattacaataaacagttaatttatttaagatggtttcaagcggaacaaaaccttctgaaacacctattttaaaagactcatttttatattcatttaatatatctaatactcttaaattgataaaatgactaccaaatccgtcataagtatagttttcaaataaattaattagtttagaagttttagaattataattttctgcagttgaaattcccacacttttaactagtttatcaaacgggactactttggactgttgtgtgtcttcatatttataagttagtacttgaaaaagattactatgtcctgaagtaacaatatcaccaaatatttcaagggcatatctaatattaccactagaaagatattttaataaatcttcagcttcatcagttctgagtgtatccaatagtaaatttaagagatctctatatggaagaataactaccttgccactgttatcaaatgtaacctcttcatccccttttatctctttaacaaattgaattctcttaacaattacttcttttatacttggcggaactatttgataagaagttatgtttccgtaggcattcatagggggttttggtttcattgaccagtacgtttcatctctaagagatagtatggttgttacatttaaatctttactttttgcaaaacaataaaaacttgctttttcttgtatatcactcggttgttgatcaagattatctaaaactaaacaaacttcaaaattagaatttattaagtagtttaacactttttcaatatgggcttttttattctcttgctgcctttctatgtagtcccccactttttccatgagtctatccgagtcactttcaagccgtttccaaactccctttagtttatttgatatatctttcttgtatatttcatataatgtatcatattcatcaatatcgatctggtcagtaattcttagatgtttttctatatctgttaagatttttgtttcgacttcatcgacatcaccgtaccaggtttgaaaatcaatataacaccaaattaatttactatgaaatccccttaataattgagtgtgaaatctttttataaatgtactttttccagctcctaagttaccgaataaaacaaatacatgcccttgttttaaatctttgttttgttgaaactgcataattaaatctctttcaattttaccggaggactcatctgaaatctccagttggtctacctcttcatagggaagaccaagtaatggaatccgacctttaatatactttttaagatcttgtccatatgtatctaaattttgattattgcaataaactttttgcatcaatatgttatcatgtgttatatcgcgaaaataggtagtaaggataggtgttaaaggagcagatagtggattataacccattctatcctttctgtatgtttcacttgaaattgatttactaaacagggccttttgccttacgatttttccggattctaagatgttttgaaaaaatgaatagcctttattataaggagaaagcatttcatacagcttgtggaaattcctattgattgcgtttctcccagccaaagctattgtatcaacacttccatcatgaggagaatatgttttggtgaatataatattctctccattacttacgacacaaaatggacagtctttttcctttccatagtttcttgcctgctctattgcatcataaagagataccttggttttttttagatttttcgaggttaaaatttgaattttcgaactctcattaagacaaaagtccactttattacttttagcttctataacaaattgattattatatgttttacaaaaataatctataaacccagcagaaacttttggttcccttacaatatttaattcatcccaaaacaaaactttagtaagaagtggatcaataaatttacatctcaaatcagtttcagacaagcctatgttttcagaaagatcctccaaagactcctcaagtttgttccaagcatctaaagacctattaatcacctaattttcctccaaaataaaaaaagattaagacttattatcttaatcttaatgaataatcccaattttggcaagaatatctaatgcgaattgaacttgtttactttgatactttggtttttcagctatcaacttatttattacaaaattcacccctaaatatgaatattcttcgtataggaaatgaacagaagccaacaactctatccaatctgcttccgataaacctatttgattatgctctatagcttgttttaagggtgttagttgttttttaacttcatctttaattttaaattgattcatatttatattcgtcggattatttttttcgttatatagaatctgagttaatgcgggggaatatggtccttttttataccatgaaaattcataatctccgcattgtacacctatctgtcctgctagataaacaattttttgagctataacacgatcatctaaactgttaacggagggcggtcgattaacaacaaaatcatgcacaacatgaacagatatatattgagtattcattcaatcccctcccacaatacataattgtattatattatatccaaaacagatgaaaaataaaacaattccacacaaatttttttacaccccatgcagaaaatgtgcgttcccctttttgtaataagtggcaaacgtatcacaaaatacaccaaatgattactgaagaaacaagttttatttacagcttatttcgaaatggagtaatcagtgttataaatgcaacaaaacaggcataaagacacggatctaattattcattttcctttatttaatccctcatatacctttttcttcattcttccatggtaatatcttgttgaaacatttcgaatgaaaggatatggtcatgaaagttttcgaagcaaataccctgctggccgccgccaagcagcgtgcgggtgaatataaagaactgcgcggccagatggttaatctaaaaaaagcgtttcaaggtatggctgacctcggtgaaagcgacttttcaggccggggagctgacaatatcaaagcctttttccaggatcacgccggcgtcacagacagctggcttgatctgatcgatatgaaaatcgcatttctcacaagccttcccggcaaagtcgaagacgcaggtctttccgaatctcatgtagaagaatcttttctggagcacgagctcacccatgccctcagtaaatcaaaggcgattatggaagcccagaagaaagacatgcgctccatcctcggtgagatcgaagacatcatctcgctcgaattgttttcaaccgaaagcacagatcaaaagctttcttcagctgacaaaaaaagaagcgaaaccatacataaactcggcaaacttgatcacgatctaacgaaagaatacgcagaaaccgaagcgaacgaacagtttatccaagctgactttcagcagctccaaaacgccacaggcaaaggaaaaagcgccacgccgcttcactacaacgccaaagcgtaccgtgaaagcgacatccataagaaaaaaggcgatatcgcaagacattcggatgcttatttgacgattaaaaaggaagaagcgaaagagcgtgaaatcaaggatctgaagaaaaagctggctgatggcgtaaccgacccggatgaatacttagaaatcgccaaaaaggttggctatgagaatctcacccctgaacagcttgaatttgtttcatttctggaacagcgtaaagctttcatggataacggaaaagaagcattgcaaatcataggtgatggcgccaaaggtctgcttgttggtgtatacgatcttgccaaggataccggtgaaggagcacttcaactcggacggaatatcggttggacaattgacaacttaaacaaagatcctcaaaaagttctggatactgttctggaatacgactatctaggtgtctttcaaagtatggttgacacattgaaggatgattgggataaaaagatgattcacggcgatgcatatacacggatgcactatgttacttacttgggcggaagccttctgttattgaaaggcggaaagtcctctgtctcaacaggctcgaaagatcttgctaaagttgggaaggcggctagcgaaaagattaaaaatggcaatccatctgtcaagccttatgccaatagatatacccctgcattagaagggattttacaagacgccgggaatactattaatgttaaaaatacgccgcttttaaagagattagttcaatcaaaggatgatttgtttactaaagccgcaccttatacttacagagatgaatacggaaacctcaaaacagttaacttaaaaatgggccatcttaaaaaccaaaaacatcctaaaactggagttccatataataaagacggttttccaattttcaaagcaaaatttgatacgaagattgattctaaactttataaggaaagcgattatttacaatttaaagatgcaaccttaaaattaaaagaagaaattgaaagagatcctttacttagaaatcaattcaatgaccttcaaatcgaaatgataaaagctggtgaaacaccagacggatatacttggcatcatcaccaagattcagggagaatgcaattagttgaccaaaaggtgcatcggcaaacaggccatacaggaggccggcacctttggggtggaggaagtaagaacagataggagttggtcaatatgacagagtggagattcgccgaaaaacctatcggggaaacaactgttaaaaaaatcgaaaaggctttagatattaagtttccaaacgactacatttcaactatattaaacaacaatggagcacgcccaagtaaaaagatttttgactatgaaaatacaaaaagtgcggtttttaatcgattacatggtctaactgaggatagttcaagttttattttagaggttttagaagattatcaggatggaagaatgctttcagggatagtccctttcgcctgtgatcctttcggtaatgaaatctgtttcgattatcgtcagaataaagaaaatccctctgtggttttctgggatcatgaaattgcttatgaagaccctgatggagctttgagtcatatatctgattcatttaccgatttggttaataaactatacgatgaataaaaagataagtcccttctcataacgagaagggattctcttattttagtagagcttcaagcttcgcttttgtttttggtccataaataccgtcagcagacaggccgtacatggactggaatcgtttgaccgcatttgctgttttcgagccatatgcgccgtcgattccaaagttctttgcgctcttatccgggtagtaatgaagagccgccagcgccgtttgaatctgttttacagcctcccctcgggtcaacgggcttgtgactttaaaaatacccgcaggcaggcggaaggatgatttctttccgttggatgaagagccggccgaatccgtcagctttattatctggccgactctgattagattcggattcttaatgccgttcaagctttgcagggttttcatgcttactcctgttttctctgcaattacagaaaggacatcgcctttcttgacggtgtacgtcgccccgctggtctttgaatctgttttttgtggtttggatgcttttttacctccaaggcgttcaagttctgcagcaatggccgctttcacttcatcccagcgccccgaatctaaaatacggtgcgggcagtatttcccattccagtcctgatgctttctgattttgttaacgccccatccgcgctcttgaagtaactgagcgacaaacttgatagccagcgcctctgctgcttggtatcgcgctccgcctgacttgctgtagcagatttctacaccgatagacttacggttcccggttccgtttgtaccgtcgccagaatgccaagcgttccggtccagcggaatcccctgaattacttctttatcatctacagcaaaatgatagcttgtcgattcgctgtttcccgtcatataactgatttcattggcggctgatgcgtcgtttgctgtgttatggatggtgatatactccggcgtcattggattcgggcatttcagtgcgtaattttcacttggaactaatctttttttgactgcaattgtcatgaaaaatctctcctattctgtttttgaattcaaaaaacagcagccggattaaccagctgcctgttcgtctttttcttttgtctgatcgttgtcgctttcaattacgtgaagccggtcagtgatgacggccggaattttaacgccgatctgtgccaaattttccgtgatggacagtccctcatttgcgatataaaaaagaacggttccaaaggtcagaacaccgttcaaatttgttatcgtatcaataatgtttgcgacgatgaccaccataaaactgagcatctttcggacatatccaaaccacgcgctgcgactccggagctgcttcattttccacgctttgataatgccagtaatgacatccaagatactgagtatcaaaagcaagtcaaggtatttcacctccccgaaaagatatgttcttgcgatctgtaagctttcaaaattcatccacacaagtattccctccattttgatcacctccttcgaggcaaaataaaaacacctattcggttacaggtgctggttcactattattttctttcgctgacagtgcagcatttaattgttcttgaagttcctcgcgcttcttttgcgcaaatgtatataaagctttgtactcggcgcgttccttattcttttgatccaattcttcttgcagtgaaatggatttatagatttcaatctgcaactgttcctgaagctgctcttttgtcatttctttcattccgttcccctccctattcttgatccggatacgcattaccgcgctcttttgctgtaatttcatcatattccgcttgagtgatgcggcctttctcaacggcttttctcatttcaatggtcaacacagttccatttttccagcagccctcaaaaaacccgtaaagtgtactctgactttccatagggccccctccgatcattgtgattgatttgccattaagatattacaggctctttgaagatccaaaatttgctctttcagcctttcgacttctgttttttcactatttggatctggtttaggatttacaactgttggttcaagcttcattttctttcttctcctctccgtcttctctacacataaaaattgtgccttccctagtaccatctggcgacaccctcactgatacaggaaatgaaatcaaaaagttttttccttcataagcacaataacttctcccgtcaaggtaagccttacttagagaaagggaagcaatctctttttctttatctaaatctaaccacaggacatattcgaccgtggaagtgtcgtccggtgtcagatcgaaatatgcagcgtcaacaggatacgttttcccttcgacctccgcgtcccgtagttctcctgctgtaatttcaatacctgcttcggtctctttaatttcagcggtataaaaccaacctggattagcaaaaattgttttaatcatatagtttcccccttcttaccttggttctatgaaaacagcaaatctgactctgaactttctgccaagtatagccgttgaactcccagtacctcttaaccagacccggaacgctgatgtagatgactggctattaacatgagcgtgaacgtgatcagcatatgaaccgtatacagttggtagaattaagaatacattctcaatgcttgagataccttgtaaataaacatcagttccaacacctgtataagcatctcctttggacggcatcgttatttctgtctccatcagtcggacaattgcatttgtgtttagtgccccgtgcgtgtccgagatagtcttatcaacttgaatccctaacaatgccacgcccgggtatccgggactatcacccgctctcattgttacagctctttcgccacccggtgtaagatctattccacctgaaccatctaaaacttggatgtttatacctgtttttgctctaagcattaagtcttcttctgcaaacatatattgtttatttccgacgtagtgtgtcgcctttgaaccatttgtattgattgtaaaatagttgtcagtaaggtgagatggaacataacttcccatgtacattgtcgtcgccccaccttttttcatacgtaaccatgcagatgaatccgaatcttttagagcatcccagtcattacagtacatctgaatctcagcatatccactttgatttttattaccagacatactgattgaagcattgcttaggtttaaatatcgtgtaggctcgtctgttcccgtgtctcgaccaccggtaaccattgaaatttgaccactcgttattgtcatttcatcatatcttttccacggctctccagatgtcactgtatagttaaaccgctgataaatcttatttccttcaatatatgaattataggcagatgattcgttcaacggttcaaagcgtccgcccttaatcagagaccccgttatatcaatagcgttaattgtccctgaagtgattttgtccgctgacaaactccctatctttgcattagtgattgctccgtcaatgatatgtgcggtgtcaattatggctgttccaagatgtgcctttttaattgcagcattcgcaatagcagcagatccaaccgccgcgtctgcaattttcgctgatgttatcgcggctgattgaatattggcggaaccgaccgcaaggtttgcaagatagttattcgtgataaccccatcaaccaaggctacgtcatagggactgtagccatattctttaattaccgatccttttctgacttgaacttttcttacgatataactgcaattactgttatcatgtgaaccacgaccgcccaaaccaattgtgtaattattaccggtttccggtgccgtgaattgtatattcactctcgcgaattcatcagccgggtaattgcttatgtccgtgagcccgcttgaatccaaggaaataaaagtgcttcctttttttagatgattccaagatatatctgttgtattatttcgtttcacttcaaaagacagggtatatacttgatcttttataagcgacatcgtctgtttcacagaaagttgacttacaccaaaagccttggtcccatcctgagaaattgtcatttcattgaattcttttttgtctattgtgtactttgagcctgaataggcataccaccagctgctatctatcaatgagcccggcaaaatattggcatcatcaaagtttctggaaagcttatcagcgtcaacggctagctcggccagtttttcttttgtgatcgctccgaaaacaatgtcatcagtcagaatgcgctgagtggtcgcggaaaactgatccgtgaattcgcttgctgtgcctcgtgtgttgattgagcgcaaacgataataccaaacttcatttactcccgtaaaatgctcatatccgcttgttttgcctctgaaaatacgattctcttttaatggggtgaatccatttacctgtgaagcatatacctcataagccgcaataaaactggacggatcataatcccatgttagggccacattctgaaacattggcttgatcactacattcgacggaacaggcggagctttgtcagggaaacttccatccgtaacctcaccagcgtccggtttactttcccaagtgccgcgatttttttcaattacgctttcaatttgatcaattcgggcgtctttttgtaatgctgataaaaattggccgatctcaacaacgcaagtgttttcagggtcggtaatatcgtattccattgaaataacgcgctgcgatgtctcgattgggatagcaaagtttcgatcaattgcgatcgttgtatctcccaattccacatgttcgtgttcgtgtcccggcacgctctcgagcagttgcacggacagctcataattgatttctgtcttgcattcagtcgtaatcaaatgattatatgtggcctttaagagctcttccggatctgttatgtcttcattattgaactggccttcccgatggatcagcttaccatctttaagacgccccaatcgttctaataaatccggatcgccaacccattcctggcctaaaggcttatcgaccgggtcgccttttgattttttccattctacttcagaaaaatcaataaaacgggaataaccgcccgtttcctccccttcatcatctgtagatgctatggatgccccgtaaccccaaagggctgtcaccgggtaactgataacggttcgccggatatttgttgtatccttatcactctcaaagcgctttccgctgtctttaccgcgacggggaagtatttttatgattcgtttgacgaccttgttcccgtcaaattctatagtatcctgaagctccccgccccatatattgatcacgtcagcgatacaatccagagctgtttttttatagaaggtagtcgtattcactccaagttccgcagttacttccgccacccatcttgaccgagaaagaacgttgtccagtacaaactgagcagttttatcggtagggcggaaatcttttacaaaggtttcggcaagctccatcatggcagcctcacaggtaacctgggtgttaacctctccttcttcacttgtatcatccagttccttgatgacaaacagacgcattacaccgtccttatccttgaataccacttgattctcttcaaataggaagcgcgcgtcagggtgggaggcatcggctacaaaagaaaaagaagagcccttgttgagctcttctttgtatttagcatcccagaacgtacaggtttctcgtccgtggctggacagcactgtcaataatttatcatctggtgaaagtatataaatgtcagccatgaccggacctccttacaaatatgcctcattaaacttgatgctgctcttatgactgaacttgattttaactggcgtcttgggcggcagcagtaaccaatctgattgaatttgaagtgctgtcatgattaaattaccgctgcaagtgacctttctttttgctgaatcaattacaagagtgtcaccagcgatgaaatcgtacagcagcttgatcgttttcgatacagacccatcagcattaagaagagccacctcatatgaagtggctttctcttcaaaaacgcattcgattgttgggtctacggctgcatagcccggattagtaatagtttgaacacctgaatcaaattcaaaatccttcgccgggccgtatttttttggatcaggacagataaaagtcaatgttgcagtctgaaagcctccctgttcttcgccttctgaaatgctttcaaagacagcattatagactctgtcaggctcatcgtgaaaaattaacggtttaggctcttcagtatgcagaataaaagtcagttcctcctgcttttttttcagctcttcttcactacggaaggcaaaaagaacctcaacggttatgactcttacaggaattcttgtgtcccgcaggaaacctcccggacgattccctatagtggctgtattcacttccctccctgtcacgcctcggccgcccgtggactttacataaaagaagggtgatatatcaatgccgtcaaacgtgattttccattggtttggcagcagctcctgataattaatcattaaatctcaccctccttgcgtttgaccttttctgtgcgtctgtgacaggcttttctactccttgaccgaccttcttgctgtccatctcaacaacaatcatcctgtcaggcaattcaaggttccggatgtccgcgctcaattcttttctaaccgtgccgagttcgctgctagaaatggatgtgtcatatgcaaaattcatatcctcttgctgaatagtcatggcatcactgacggctcccatagctttctgaacagtgccgatgccattctgaatccccacagcgataccggcaggaaccatgatccccacctgatcccgcatcaatctggatggggagtggattttcaattttttcttaatggttttctcaattgtcgatgcgatggagtttgcttctttcgccagctcgcccttcatattcttcattccagaaataatgccggccattgtatttgatccgatggctttgccgcttttcttgagagaaccaagttgttttacatcgactgtaagctccccaattttgcggagatagtcatttttcagaagtgccagttctttatttgcggccgagcgtaattcaactattttcttagttgtctcgtttttcagtccggttaattcttgttccgcctgagtgctcgccagcttatgcttttcctgccacagcttgacatactcatttaactcggaatctgtcatgcgtgaaatcgcattaatttgatcagctgacccgacacccatttctttcaattcgtctgtgaacgccttcggtgcccgacctgctatttttgaaatgtcattgttgaacgttttgatcttgtccagctgctttttaagatttgcagtcagcttggagccgttcactttttcacttgagacatcgtcaaatagaccgatggcgttataaatcgcgtctgttcggtcttgcagttcctttttataggcatcgttggccgccttaatatcggcagtcagtttatcattcacacttttgaattttgagagataagtattgtttgcagaaagaatgcccttgttaagtttgtcagccgctttcttttcggcttccttctgctttctagccttatcagccatcgttttttgagtctgatagatttcccgttgaacctttatttgctggtcagaattcagcttgttcttcttcttgattttctcaagcgttttgatataggtattccctctgatttttcctgtatcgtattttgcctcagctttcttaatctgatctgatactttcttggtataagccagtttcgccttcgcttccttgcgctgctgctctttcagtagcttcttctgtttatcagaggcgcttttggatgcctgatatatctcgcgctggatttttcggttttgctcgttagtaagcttgttttgcttctgaatcttttgcaatgttttgatataggtatcggcgcccattttcttggtgtcatacttcacttcagcgttcttaattttgttggatacctttacctcagccgccttctgagccgattttgctgcttttgccgcggccgcttttactttggcctgcgatttatcaataccagccgccataccggtgccgacgtgataaccgacctggtcacgcattacccttgacggagaatggattcccagaagttttttcatgccgttaggaatagcatttgccattgatttcactttgctcgctaaagcccctgccatgccgctgataccatttattaatccttgtatgatgttgcggccaatggacttgaggttgatgcctctaaaaaatttcatgacaccattccaaatgctgacgatacgttcttttgttgcttggatacggtttacgatttgagctttcatgtagctgaatgctgtagaagctgcgcttttaatgccgttccaaatggacatcactttgcttttcactgtattccagaggcttattactctgtctctcgtcgttacaattctattgacgatttgcgcccgcatgtagttgaaggctgttacagctgcactttttaaagcattccagacagatgtcactttgctttttatcgcgttccacaaactgaccatcttgtctctggttgcaataatccgattcacaatttgtgcgcgcatataggtaaaagcagtcactgcagcacttttcagagcattccatatggacgagactttattcttaattgcattccagatgctgatcattttatctctcgtcgcaatgatcctgttaacgatctgggcccgcatatacgtaaagactgtgacagccgtcgatttaagacctgtccaaattgaggtaatagtcttcttaatgccattccatactgaagttgcagtcttcttaataccattccagacattagagaagaacgactttattccgttccatgttgatgttgctatcgtctttatacctgtccagacagtagacaaccaactggaaatagcaccccataccgcaattgtagccgatttcaccgtctcccaattcgcgatgatcaaggcaaccagaccgatgacagccgccgtaatccatccgataggccccattgcgatgacccatgatgccgccatacgtgccgcctgtgctgccgcttgtgccgcaagcacgacgagttgtcggccgaataaaaccatttgcttaccgcctgcaaccaacaaagatataaaattgctgatctgcgccgccgtccaagccgctgccattcgagtagcttgcgctatggattgcgctgcgagcacggtcattttggcaatgaaaagacccatctgcttaatcccgtttgtcagcattgtgataaaagaggtgatcttcattgctgtccatgcggttgctgtacgggcagcacttgcgattgattgagcagccattacggtcatattcttgatccataaccccatttgaacaatgccgcgcttcagagcagaaacaaacgctgaaattttcatggctgtccacgatgctgccattttcacagcattagctgttgctcttgctgccatcgctgtatacttcgcaatgaattgtcccatagttgctattgctgattttaattggccaatcaggccggccagtttgacacccgcagctgtggttttgaaggttcgtagataatcagctgcatctttaaaatctttaagaccgttggtaacagcgcttaccgctactatcgccggaacaatagctcttaaagctccaagtaatgagataccgactgcgataaatttcccgattgccgggtttgcctccatcgccgcattagtaaatttcaaaaacccgtttacattctccaaaatcgttttaccgagtggagccatgccaacaagcaagttgatgatagtcttcgcgatctgccccaatgtgctccatactgtagggccgttggtttttatatagtcaatgaacgattgaaattcttttgtttttgtaacgctgccagcccactcattgaaccgcttggtcagatctacgagtgatgtcatcatgtcttgagacataggagcgaatccagtaaacagctttgtcaggccgcccgaaaagtttctgatgatctgcaacagttttgggccgttggtttttgtatactccacgaaagcctgaaatttctttgaagaacctaagttcgctgaccatttcacccatgattgggttataccttcgatagattttgtcatgctctttccggccggcccgaatgctacgatcagattgaaaactgtccgtaagacgttcccggctgatcggccgaacgaagcaaacgcccccggagcttctttgttcaggtatgaaatgaacctttgcatgtccggagctttaaaagctttgtccatacttttcgccagtcccacaccctcttttgccagcccgtcaaacattggaatcagtgagttaagcgcaagtttgaacgtatttagagacataccgaaggtttttaagatcggcttttgaaccatcgtaccgatgtcccgccaattgtctttaaagtcttcgagggtctttaaagcctctctctcttcttttccgagagatttttgcagattattgatctgtttcatgattttagcgcgctcttttgcgcttgttgcattgtccagcttctcctgcagctttgaaaggtcttcggatgctttaaatacaccgcttattgaagtaatggcaagggcgccgaatgccgccgcgcctgttcccgctgttgcaaatgcactggttaaccccattactccgccggctgccaccccgagcatagggcccaatgagccgattgctccgacaatacttgcaagggctggcgagattgcagggagtagggacgttagtgtcccggcaattgaatgaccgatgactgttgaaactgagtttgtgatcttggcaagcctgttcattgacgtttcaaaccgatcaattcgagcctctatactgatccatactcttctcggtaaggacgccagagcagcgcgagccgttgccacagagcgcataagcgcagccgtgtttccgtttatgaccgtggtaattctgtttggcaatgaagccaaagctgaacggacagccgaaaccccgcgcatgataggcgacgtggccgcattaaaagtggtagttacgttatgagatactgatgctattgctgaccgcgcaacagcgacagcacgccctaaaggagtgggatttccgtctatcgtcgttgtgattctgttcgccaccgccgatagccctgctttagcgcgtgccaatgcggaagataacggccgcacattccccattaattgcgtggtgacagtttggggaatctgtctcaatctttgcttcgcccaattgatggcccgtgttaaagggtctgaatctgcatctaaatcaacccgcgtgcgttcatgtcgatgaacaaagttatctatttgttgcgccgcctgccgtacccttgcctgaaagctggcaatctcagcatcaacctcgactgtgtgatgatctgccatccggcgcattatatcgttgacacgatccatactgcgattaaattttcgtgtctgtgcttcaactattgctgtcagtctttcgatcattccctcaccccattccttgtccggattttgcaaagtggttgcggattgcatcattaaaccgctgaacccctttggctcgcttgccgagctcgtttacatctgtcttacgccatttgtcgttatcgccagtgatattgcgctccaattggcgtctggccttcttcgcatcaaacattttcgtttctttgggacgcttctcattcatggcgtaacggtgaaacatggcgtttcttgccataagctccaattcatctatttctcgcaacttggcccctttgagcagaagcttgtactcgttaggagtccatgacatgattaaatccacatcataaaccccgagccaatgtgcagaattcgtaattatttggtcatagtcgatcccgttctctctttgtatgcctctttcatcatcttcaagacttccttgccgttctcttcgtcctccagccgcttcgcttccatttccggcgtttcgttcggagccggtttcttccctttgttcatcttctccatcatcttccagcgctgacggatcacgcctttgaaaaaacccgccgagtccagcgttgtgaatgcttcattgatcatcttgtcaattgcgtcgcctgtttcgtcttcatcaatgattttaataattgcttcttcaatagcctcaattgatggcttttctttcttcaagtaagcgagtgcacaatcccaaaaagcagaaagataggaagcctcttcgttgagcaagctcatgtaaatattcattgtgccgcctttgcccttttcgtccgcagtggaatatttttcgtttgccaatctgtcaaaagcaaagtcgcagcgtgatttgtattctttatctccgatagttaagtaagccatttataaaacctccgattatttttttatgttaaaaaagagcccgggaagtccggaccctatgattccttttctgttcgtatcgtaaaattggccgatcgttttgatttcccggccgagttcactgccgacacattaaaaatgtaggccgtgtccggcttgagattaggattcgatgtatacgaattctctgagacagtcgctatttttgcataaaatctgtaaatgttgtaagatgacgcccctttcaccgcatcccatgaaaaactcacctgatttgaagtggcggttttcgcagttatattgcggggtacgttagggcgtaaccgcttgtgtttgcgtaacaatctcagtcattgaggactcgccagcatcgttcacagcagagacgttgaccgtcagtttcgtgtcggctgcaattcctgtcaaggtgtgggatgtgccagtgacagttgcgtccagttgcttgcccgctcccctgtataccttatatgaagtcgccccatctaccgcatcccatttcacggtcacgctgtcagtcgtagccgtgaacgatagattttggggcgcattagggcgtagtcgtgccgccgaattcctcaaatttagtcgcgccggcagaggattcaatcgccgctaatacttcgtccgatagtggaggcaattcgcctttgaatgtttttccgagtacaggaagagtaacggacgtctcaacaaaaccatcttgcggctggctcgcttccaaactttcaataattgcatgaccataaactgcgttgtgctttccatttttatttttgtttttattgactttccagaccttaattgccttttcgttatcaaatgcgttttcgatcgcttcctgccctggatcggacacagcagcataaaaagtcagctcaaagctttcattttttgtaccgtaaccgacaatacggcctgattttgtggactcgtccagcgtgtcctgttctttcgtgtgtgacccttctgtttgaaaggcaatgaacagcccatctgtcccttttgcatccatcggctgcacaaaataaatctcatctttaccgtttaataaatccggcattttgttcatcctctcaattgtttattgtgaagcgcattctgagaatgccgtgacgcgtgtacccgtcaatatcggtgatcacctgcatgctgcgcatctcagaacggcataaagaaaagccctctattgttaggggcctgcttgttaacgcttgaagcatgaggctcagaatctccattgcttctttttttccgttgtaacccgaccagcagtgcagaacgacattgatttcttcaccgctggatgtctttgtttcaaatggggaaacatcatcatctcccattgtgacataaggcttttgctgatctttcgggactgcatcaaagacgcccgtgacgcgcccgttcagctcttcgtctgttgacaacctcttaaatagagcagcctgcaacggccacaaggcagatcgcatgatgacagctcctttctatcacatttgactggcaaaataccgcatgccttcgtccaccgctggattccagaacggctgcgcccgcattcctcgggtgaccacccatctattaagcttggtgtcataataaacccacggcgtttgccggccgccgccttcctctgcgtaaatccccgttccgtattccacatatacggcataatcggcaccaacagaaataacggcccgtaagccgccctcttggtagtcgatttcaattgaatttttcaggtttcccccgtctatcgcggcggtcggagcattcagaacagcatggctgtaaatcagctcggccgtgtctgtgaccagttgcttaatatcatctatgacccggtttctgaactcgctcgtggctctttgcatctgcctgacccatctaccactgacctcagccattgcccttcagcacccccgtaatctgacatttcaaattcataatctcatgcatgccgccctggtcgatcggttctgatttgagagtcagcaccttgttttcgtagatgatccgcattgtcttctcaatatcagtgcgatacgggaaatacacattgcaatcaaccgggttctgaagttgctgagcctgataatattcccgggacgtaatcccgccgacaaatgcctctgttgtgagataatcagtgaatttttcaacatagcccccgccgccgtccggcaccttttccacccgctgaaacgtgacaacatgcggaaattcttcatagatcatatgactctcagctttctgtatggagcaagaagcttcgtaatgctgcttggcagatctgtttcataagaatatgagacatctcccatacttcggccggaaagattggacggagtcatgttatgctcgatcgctttcgcgacatacagctttacccctgctggtaatttttcatctccattgaccgtgaatgagttgttgcaccagtctttcgcttgatctatgaacagaggtaggacctcggccagataggtatcgtggctgtctgtttttatgccaagcatattttttacggtttgaacatccatagaatcacctacacttcaccgagaacaattttgatcagttcctctttaggcgctttgggatcaaattcatattcgttctccttcagaaagacaacgatttcatccttattcacctttttcaattgctcttcagtcatatcaagaaggtttgtacccggccgttcgttcgactcctcagattgtttggcctcttccactctcttaaaaccaatgtgagaataaactacctcaaaagccttttcagtgcattcaatggttttggaaccgttagatgctttcatatcacgcgccgcctccttccagtgcttttatccgattctctaaatcagatagtttggctgtcacatcgtcaccgagtttagctaaagtaactgccttatctcccacattttttgtttgaacgctcccggtgccgatattacgattttggacagacccatcaccgatattgatgtttttcacttctccgtcgccgatcatttccgaattgatagttttaggagcaggcgttgaaccgggcaaaccggtcaccttcgcaccctcttttatttcgagctcgccgccgatcaccaatttgtcgccgttattagttttatagtttttagatgtgtaccccataagcttacgcctccgttgctggtgtaatggccgcaaacgcatcgtcagtcaatgtcatgaatccaacttgctgagttacacggagagcaaccatatctctctcatacaagttgatcgggtttccgtctgcatcgacaatggttgtcaatgttgcatcctctgagattttgtattccatgccttgagggattccgtaacgtgtgtaattccagtcagctgcaagtaatgccgctttttcgtaatcccatgacttagaatccgcatatccaatcggaaggccaagagcctgctgtgtggcgccgcctgtcgcatcgttgaagatcggaagaccattaccatcctttgtgccgcggagcttttgacggaatcggcgtgttgttgtaaagccgtttacatctttgtcagcgtcttcaacaagagccatgaccccatttaactcatcatatagattgccaagtgagtttaacgcaattgtgttaccagattccttgattttttcaaatacagatacgccttttccaaacggtgaatctacgccgaataacgcagcctgatcaaatttgatcgcaaaggcttcagcgatagcagggcgcatttgtgtgaagaaatctgttacagagtagcgcaagaattctttagaaacagggatgatgacacccaatttctttgaaatcatttttgctgttaaccattgagccttagaagtttggattctctcgccttctccaacccagtaagctcccggtccagaagccaagtacgtgaattccttctccggcttactcatttcttcatattttgctagttttgtgacagcagattgggtcataaactcttttaaaaccagcgttccttgttcagttggaaccttcccatttactgagtcttgcattaatgcattgtttggatcgaatgtcggcatattaatagccctccttattttctaatacttgcttcagctgcaagcgagctgatgtctaaatcttgatttgtcggttcgttgctaccggactggacatcacggccattctcttgaaacttggattcaatagccttttgaagtgcagcgttgtacttctcttcgaatgctccgaggttcttcatcgttgattcttcatcctcaccgacaaagaatcccactacatctacatctgccggcagttgcttttcggaagcataagaaacagctttgtttaaaagcttttcacgttgtgctgctgtcttttgatctttcagctccttttccagcttcctgatccgcttctgctcttctgtttcttccggataaagctcttttacctttgcatcaaccagagcatcgagattgttcgccttccacgtatcaagcccttttgtaaaatgagaatccaaccgaggctgaatgagacgttttccttcttctgtatctaaaaacccattcaccttgtcagcagacacggcagaaagttcattcagatacgactgtacttcttcgttctctttattttcttcaagaaattttttcacatcttctaatgttggcattacgcttcttcctcctttgccctctacagtgcgcgcctgttatgagtgcatgaaaaataagccttttaacgtcatgctcaggacaaaataaaaagccgctgtttaacgtcttcccttttcctcaatggatttgtaccactcttcataggtttggtatgggattgtttggcctgccccgctgccgccttccctcgcccttctcgtatccggcaggacgccgtttactttgaaagcaattgtacaacggcagttaatatcatctttggcattattcatgtaccccggagccgggccgacgccgccgtaaattgatttgaacagcccattgcgttctattgtcttcccgtccagcttcctgtgaccggctcgtgttttaagatccagggtagcattccacatctttttaagattgctccgttttgaggccttctcagcgctttccatccttgccgagacttgtgccctatgagcttctgttctcgccacgtcacgggctttcctgcgagcaaattcggtcgctctttcaatgcggtgggcgatctttgaataatcctcccccgcttgtaggccctgcgagacggaaatttgaatctgccggacataatcgtctcgatgccgcctgtatatcgctgacaaagtcaattcggctatagggtttagaacggcctgccgaatgacttcggctgtcggaatgctaaaacccaagttaaccacggattccatttcaaatagataagcagaacgcatataattctctaaaaactgcttggctgctaatgcctcaacaatagtcagaatggttttgaaagccttgtgcgattcctcggccatcctctccatttccttgttcagacgattgtatttgttggcatcggctaaagtaagctggccgtccttactgtatttcgcatacagccgggcaatttgtgcattgatctcctttaagcgagatgcaaaaacgacatcaatcttttgagcatcctcagtgatcatgtcgtccaggtacttatcaatatcattctggttcatcttcatcaccgcccgcgtctgtttccacatccgttaacggcggcatgttgagcctgtattcctcttcttcctcttccatcttcttcagctcatactggacatcatcaacaaacgacagcagagacagacgggtttcttcgcttaccattcctttaagctgtccggtcgtttgtgcttcctccagtacatttgccggaaggttccgcttaaagccaaaccaaacttttttataatcttccgctgccgctttccttttagtgccccatgcggaaaagatcaatttgtattgataacgcagagcagcagtcatcttccgttccattgtgatgcatttgttttcaagcgacatcaatttatatttcatcgcaacccctgatacattcccaccaaaagattcatcggagaaattgaccgatttcgcaaagcgaaggatattctcttccaacctatcaagatggttttctatgatggcatcgtttatatcctttgtcagatagcttacgtcgtctttttcgtcatacaattcaaggattccggtctttttgagctgatcaagcgtctcttcatccgcgccaagcccttttaaaatcagataagccagtcgatattgctcaatctcattcgatgcatcggacaacgtgcggtcatacgcatcaattaacgaaagaaccctttcggcatctccctttagttccttgttattcgctaaaccgaataaggggcagccgtcaaaaagatgcaaagtttttttatcaagagtgaaggccgagctttctttcgtactgaaataataaacatatttctgatcatagaattctgctttgatctttccgccatacaccatgtaatatcgcaaagcgtaagcaggttcatggatgcttccatcagtaataaaggcgcattcccatggatcaatattttttatacgctcgtttccagaacgatcaacgtaagcgaggcgggcgccgtaaccgcaaatagaggccattttcccccactcgctgtcttcatcagcaatgttgttttccgtattgaaaccttcaatcagctgtttcacaagttttgcattacttgcttcaccgctctcatcaaactcatatgcaataggatgaccaaacagatagcccacctttgtatcaatgatttcagaatcaaacgagttgttcagcctattgtttactttgtgatcaatacgttttaatttccctgtttcaaaatcctcgtattcaatggcttctctggataagatcggaacgccctgaacctcagcctggtaccgatcataaagctttttcattctgtcatgatccggcttatgttcctgaatgatcttatcaatcaattcaggcgttatgccggactgttcaatcatgtctataaaatgattcatcagctcacccctctccgtcttttcggtttattatgcgaatacagagcgtaccggagtgagtccagcacgtcgtcccattccttcacaggatcgccagtcttttgattccaaacatacataaaaatttccttttcgaagcgagcgaccttatctttcacgatgaacaattcatttcgcttaaacagccgcgccacttcttcgataccggatatgaccgccttatcagcgttcaatgcacgcagtttctccctgcggaatcgctgaacgtgttccggccgcgcagtatcgcagtagaaattgatgttgccgtatcgctctttgatgcccttcgctatcttcacccagtaatcaatttcctcatgttgctttgcatgttcttcgagcaaataaaaacacccctggtcatcttgtccgattacaacaatagaacccgggtgctcatatccccagtcgacgcccgcaaaatacttcttgaaattgacacgcctattttccaattcctcagagctgatatagtgaatgtccttattgaaatccttgtatatgactccttcaggcgccacccaataaccgtgtatgtcccgatctgtaaacatgccgctcggcgttgatgccacgatgctctccacatattccggatcgagaaaattgttatcgaacagcgagaaatgaaatgaccggatgttcagccgtccgcttttcaacatttgcccgtctttgtcgatataatccgttttgacggtgtgcatcgggttctcagggtttgtatccatcatgaccacagcgcctttgtaggagcaccgggaaatgacttctttcacgaaagagtcatgcagggcagtcgcttcattaaggaatgcgccggctgacgtgaacccccgcgcttttttccatgaatcagcattggccccgtcaaagcaatatacacggttgccgaatatctcaacggcattcgacttgtcgagcctcaattctttacccagaatcaattccatatcgttcaagacatttcgttttatggctgcctgagtagccccgccgatgatgaaggataaacccatattctgatacttactgacgtgagcaaggaacgtcaaaaggagcacgaatgttttccctgccctctttgcaccgctacaaatcagaattttgggttgctctttaataaagctgtcccaaacttccttttgctttttattcagttccatcggcattcaccattttcctaaacattgcggcaatatcattttcttgggtgtttccgtcgccgccgttaacagccttcttcgtcttctcgatattcaagcgcatttgctccaatttaaggcgccgctcatcttgctcatgcgccagctggtcaaattgcttgatcaagctccggagctcgcccattgcccgagattgagcgttcaggaatgttgcatgacgatcccaagcgaattgaaactcccattctcgctcatcgccaaacatacctggcttctcttttttcaaaactttggttacatcatcttgatcctgcacaaacataatgcgttgcgcccgtagaatggccgcgtattgaatctgaatctggtcccatatcatatcagcaggggaacgctcctgaatctcttccatgatttcaagcgtttccgcgggcagatactttgagaaaaacccatgcgaaaccgcgtttcgatttctctccggggcgccgccgttgtttcccaatgcatttttattaccgggtggggcgcctgccttttttgtgtgcacacttttttcagagggtgcacccttttttcgttcccaaccatgccgctgcttccacgatttaatggtgttcattgacaccccgtatttttcggcaaggtccttgtatttcatgcctttggcgtaatccttatacgcctgaatgtgcttttcagccatctacatccaccgccgcctccttttgaattgagttgttttggaaaaggatattctctctaaaccgacgccgcactcagacckttaaccgccaatagtttttctgagatttaccggaatcggtttacagagaacataaaaagcaccctttatagggtgctatgctttattgatttagaagccattttatacgttcaactgaagcaatgtagtgtagtattattagacaaaaaaagataatactaactgtttttaaatcactaaagtaaatcgccgcaacagctattgcgaagatcagtaattcaataatcaatcttataactccatttacggctattacagtttgaccacttcggcttggatcgttaggtactgcaaatacagtccaaattagcattgctactatcggcaatactaaagttaaaacatatcttaaaaaaccattgaaatgactccaagcaaacacccctatgcagattaatgcagcaatttcaagggcgaatcttaaaagtaaattagtttggttcagtttttccaactcctctgtattaaaaagcaccccgcaggatgctcttttcgagaactattttacgcttccattcttggcttctttttttactttttcccattcatactttaaatactttctgcacttattaactaaactatctgttaaattcattagttcgtctcgacctgcatatccatattgtttacgataggtgtcacctataacagccctcgactcgctatatatttcctcgaaaaaattttggaatgaatagtcatcgcttttaattttttttgcaaattctttctctttctcttttaatacagcttccatcgctttttctagctcttcctttggaacagtatctttcttttctatgatttttttcgctttatataaaccaattattttctgatttattttatctataagttcattaatttcctgatctttactgtcagtatagtttaattgtaacttaatattattctgtagataaaataacctttcaaaatattttgcttgctcttcaccagaaagaaatggtttatcatcataataagtagccaatgaaagatactctgagatgagttcttttaaattagtcatccacttaactctttcagtagtcactgcattaacaaatctcgactttttattagttctgatactaataataagagtcgtaataccgattactaatgtaaccaatattgacaccaatgttatccaatccttaggctccatgtttattttcacacctcccaccttattatcggttaaggagtgtgataaaggaactatttgcaaaatttgtcgaacgaaagcgcccttcataaataggtggcaaccgtaagacaaaaaaacacccttttgacagggtgcaatcaacgtttctttttatagctttcaatatcttttctcaagaataggcgatctctgttcgtagttttaatcggaaccaatgttttataatccaccagctgcttgaggttctgccggctgcatcctattatctcaatggcttcagatgtcgttatgacctctttatccataaaatctctcagctcgtctatactctcaaaaataaacttagccatttcggaggtttctccattttagggttatattaattatagtcaataccaaccagatcattgccaaattcatagtaataatatcgagagtgctgagatgaccataattaaaattagtgaacaatatcacaaacagaataaagaataagatcgttgaaccatcgattaattttttcatatttgctcatttccttctatgtttttgaaaatccaaaatatcctcttttagaaaaagcctgtcccgaggcatttctttcatcggctctaattccccgcttttaactaactggtttaggtattgacgagtgaagcccaatatttcaattgcttcgcttgtattaacggtttcctcatttaagaaccgtttaattgcatcgcgttctttaagattgtacataatatcatcctctttgaattccctaatttgtaacaataaacaataccattatacctataacagtagtagttcttaaagattttttgaaaacttttcttatgtttcaataaataaacaacctattcacgctaaacagaataggctgtgatctgctctatttttcattttgagacgggaacgttcgatattcttctgcacggttccttttttaatccccaataactgcgctatctcttcgaatgacatgttttgtacagcatgcatcatgaaaatgtctttttctctttcggtaagcacggatagggcatcagcgattctttccttatcccaatcacttacttctccctcagcttcttgaacgattgcgtattcttccggcagcgcatcaattaagcgaggttcagcaagaatcgtcctttgatatgcgtctcttctgtcagcacctcggcgtgcgcccggctgtcttccgttctgcagccattcaagagtgaattcaatgtcactgatcatgctactgataatctttttgtcgttgacctgttcagccgtcagattgacttcagccgtatctttgtagagccggtacatttttcttgtttctcttaaagctcgtttgtattcaatgattaaatcttgcatcctgattcctccccttatctgcgcttaaatgcgccgcccttgcctcgtttaagtgtttgcatgtttgtgttcatcatttgttgccagaaacgatctgagcgcccctgcgtgtttttattgggctttttctttttctgcttcatgtcatccctccgctcaaataaaaaacggacaccaatcagagcacagtaattctgtgcaatgatcagtgtccgcaggctttccgtcttggacttatttaatttggaactttttttgatggcgaatgatttttctctgatatatttgaaatatttaatttcccaggatcaattcccatcaaataaaaggctaattgagcctgtactaatgaacgcaatttttcatcttgaattttatcagctaaggctatggatttattacgattagagttttccattagattgtcgtggtattctttaacccgtatacgtaatttttgtgactccttcaagaacataagtgaaatcccctcaaaaattaaacttcctatgacgctaattgcactattgatagtgttatcagagccaatagaaaaaataataatacctattaaaaggataaaacccactattgacattgttagaccagcatagaactgcaaattcgaatgagtagttgcttgttgttcatatatatccaatgccttttcatcagattttacttcatgttcttctttcactacatttttttgttttttcggctctgcatagcctagtttagaatctttaacgactgttgaattgcttagtaaatcttttttgtcgttcttagctttttcaatttctctcaaatacttcaattgctgtatatatctttcttcacgtttgttctttattgatgtcacatatgaaagtaaaactgcagtaattgtgataaatacagtcataacagaaagaagcaatactgatgaattttcaccgaatacagataaaacatccttcaaaccattttcctcccgaaaccgattatttacagtaaatcctattttatcatatcggttatattaggatttaaatcaagtgaggaatgaagaatttatatcagctttaattatgatcgcctatctctttttctctctatacttatcaatatcttgaaaaaacgccgcggccgtgaatgcaatgattgctcctattaacgtgatgtttgctttcatgtccggcctgtattcgtactggaaataaaaccagaaccctaaccccatcagcataaaaactattctcagcgccatcgaatcccccttatttgatttgaaatttagctgattcaaatgttccgatatagttccgcttgccagaatcagagtaacagtccagctgaatgacataggttcctttcccggtcttattccggatcgttttcacgttgaatgatttcagaggcgttgccgttttgaagctgccccgctgtactaagttcgtatcagtcagcccgccgccgctgcgcttcttgtatacgccggccgtgtaataaagtgtgcttgattcttttctctcggctttccagtctatcgtggaagcgccaaccgtgtatgtcgtggcatccgtaaacacccggccgctgtacccagattcattttgccagcctgaccatgctgcggaagcagacggcgcaacggccaccgttcccgtaagtaatgcagctgataaaatgattgatttgaatagttttttcattattttcccctcctaattcacaaataattaacatttatttacaaggataatcgttattttgctcgaattattactgtgtttcataaaaaaccaaaggagtgtttaaaatgaatttcaaaaagactgctgttactgcactatcgattcctgtattagctttttccattagtggtatggcttccgctaaggagataactcctcaaaaaaatgaaacgcaaacaactatatctcctggtccaattaaagcctattacgatacttttgaagtgagagccgggggttctaaacaattagatgcaaaatatttaggatcagggttcgcttatcattcagacaatagcgctgttttcacagtagacaccaatggacttgtccgtggcaataaagttggaaatgcatatttaactatattcaaaaatggatcagtatatggtcagttacacgtatttgtctattaattttctaatagaagagcattctaatatgctcttctatttttccactttaccacccatgccgcaccccaatgcgggcagtgtgcatctgcgcggatttctaaatcaagtttttataatcgcagtccgggcaatggtattcgatcatggtcggaccaccgaatcaaataagctgagttgagtgatcttatagttgaacagcaataattcttcagctccgcggctttttccggatccgccgacaacctgtttgtatgcggaaaaggtttctgactcccagttcgggtagatctcgagtatcaaaggatcatcgtaataggaaaggactactttccctttgacctgattaagcagccgggccagttcccggtgatcctcttcagtaaagccgccagcataaaaccgctcgcgcccaacatatggtggatccacataaaacagagtatccgggctatcgtacttctcaatgatgttgcgaaaatccttacattcgatcatgacgcccttcatgcggttggcgaaagactcgaaggcagcacaggcgcttatgtatccgccagcagggttctgcccgctttgtgtgctatgcctccagcctgtttgtggcacttcctccgcgttccccttactaatgccggaacgattcatataaaaccacctgacggcccggtcaaaatcatcttgcgggtaatcttcagttttccatttctcatagagcgcccggctgtacggaatggattcgcaagcttgctgcatggccttcggatcctttctgacttgcatcaagaaattcaccacatggccgtcaatgtcgttatacacttcatgacctatttgcggtttattcgctataacatgagccgcgccgccgaaaggctcgacgtacaccttatgggcgggcattttatttatgatgtgatcggcgtatcgacctttgccaccaaaccagattaacggtgagcgtgccatcccttaacccccgatcaaattcggcagcacagagatagcgaagaagaagagccccacgcatgccccgaccagccagatatttgttttatcccgtttagcgataatggtatcgccgatcattttcagatcgtcagaccgagcgacaagcgtcgggatgtagtccgggtgaacctttaaaagctcggccgcctgctcgacagtcattgcttcgtctttcgtggccttcacgttccgttgaagttctacttgtaatggcatcattatgcccccacctcccgcgcttgtggtaagttcactctttgcagaaattcagccgcaaagaatcccgaaaaaccatctaagaaaacaacctttgcgccgctgtgagaagtaaattcatcgctagtacaggaccaaattcttccgtcgtatttgctcgcttcatagcatgtgtgcatgacaactaattcacctttttgaagtggttttctcattccgcatcaccctcccatgcagcaggaaactgaccgtttaaggccttccttaccactccgaaagggtcgtcctcttcatcggtgaatgtagcaagcaaccttctgaaattgtcattctcgtatttaagccgcttaatctcttcttgagcctgccgaaactgaatgaccgtgacatcctgctggcgctggtgttcctcaatgattgcctgctgttttctcatgtagccgatcattatgtctttgacataactctgctcgatgatatagcaaggtcctgcatttatatcgagtggcttcaattcctcttttgaagctaaatgccacaatgacaagtcacttataatttcctgcaatttatccatgcccgttcctcccccgcaggggaaaccccctgctatttgaatttatggccgatctcgtaatcacaacgagccaggccgccttttattgtttgaatgattgttttaccgtgttccggggcgtccattaaatgagcagtcccttcagtgccatctaaaacgatgatgcggactttccccggctcgatgctttgctgaatagttgtttcatgattttttatttctgttggcttgttcactctggccgccccctgtgctatgatagaagtaccagttcatatcaaagctccggggcttcggcttcggtgcttttttcgttttacgacggcaaccgcatcgtcacgccggcagatggctttaattcctcgcggtagatgatcggatgcttttcgacgtaagctgccaattgctccggcgtcattttccactctttaactggaccaggcttgtatggattaattttttcttgcatagcgataacctcccgaattgatttttggcatttctgaacctccaagctttttgcaatccgctcccatccggctggcacatcgtttgtattcggaacagagcgtcatgcaggccatgagcttatcttcttcctgcacccacaacggccgatcgtctgcgattaccacgttttgcagtggtcttccccgcctttcttttgagttttttcagctcgtccagctcaatgaagccgagtgacttatccagagccagcaccttgagtggcgtctcgtaaagccgctcatacagcttgcgtttgatggcaaattccgttgtttccacgcctttgatgtcaatgatctcgatgctgccgtccaagttatgaacctcaaagtctgcaatatattcaatcttccgaaaagttttgccgttctttttgaatgcctcttgaagcaggaaccggggttgcagcttgaaatctttgatctgcttgctcgctttgagccatttcagctgctcatagtatttggcttcggcccggctatcaaacgtgatgccgtccacttgtgtttttctggctccgtacttattcgtttgcatgtgatgcctccaaaagctcaggattttgatagactgttccgagaaattcagaatccggcccgcaatcaccaagagaatcataatgcccgttggtatattctccgtaaaatgcagctaaatcattctcgtaaacaaccttaaatattctccccaaagtgtcttttcgaatgtctccctcccaaatctcctgcctggcctcgcttttgtccttcaatccggtgtattgcaaataaattagatggtgcaacgttttgaaattaggttcgtcttctgtaatgtctgtagcaacaatgccgcttccaccaaactcaaaaacaatgtcatcttcttcgcctaaataaagcattctgtctttgacatcgtcccatgcccgaaacttgatttctctcattcttccgcctccatatctctgactatttccttatcggcccgttcccgcgtgccgtcgttacctaccgtcaatttgttcccagtgctgaatctgcttttccttgtacggcgctgtgaggatgatggctggcagcaggataaccgctttaagcactgtgcatcagctccatttgtttgattttttcctcaagcacccggatcgccggggtaaggtcctggccggccgtttgctcggcaggcccgaacagatacatgccgccggttgctgtgaaatttacctgtttatccatttctcaatcccgccaatctatgatttaacagcattctgtctcccttgatgatcacaacataatccgcacacatttcgtaaatccgggtgccgagcgcctcgtctatctttacgatctgctcgatattcaactcgcttgaaatcaagatcggtttatggttcagatagcgatagttgataacagagtatgtttgctcgacctgccaatcggtagcccgtggcttcccgttcagaggcttgaacagatcatctataaacaggacttcaacctctttcattcgcttgagcttttcttccagcttgtcaaaatcatctttcagatcattgaatccttcgacgtatggaaaatactgaaccgcgatattttttgatttaatcagcttgttagatattgcagtaagcagatgtgttttgcctgcccctggctgaccgagaagggcaatgctgttgttccgagtaccgcgtatgttatcaaactccttgtagtattcgaccgctgtatcgtaagtcactttcaccatttccggcttcccttcggttacaaaattcttgaattgcaacctttcaaattccggggtgatgtcactggaattcattaatttccggatgcggcgccgctcaatgcatccacaccgtacccacacttgataaccgtccttgttttcgagatagccgagttcgtctttgcatacctgacagtcatactcagccttttcttctgaggcggccgacttgtccgccgaaaattgagccgacctttcctgaagttctttcatgactgccgccatcgcctcgtccgtactttgtgttctgttgtttgttggcatactgctgtttctcctttcgtctctggctgaatgggtttgagaggattgcttcaatgtaattcagattaacgttgttgcctttgcttctgaaagcctgtttcattgcctccatgactttctcttcgccgtaatcatccaccatatatccgagccgctgaacctccatcgtgccaatggtgcgggctgttttgttttcgaatagttcaaatgcgtttttcattttttcgtcaacctcctgctgtcctaaaggtattggagccgggtctatcttcttgttgtaatttccaagctgtatgtactcggcataattcaacaccgtcacaatgaaaccacgtttttgcggcagccgatccagcttcaaatactcttgctttaccatccgatctaacgagtatttgatctgatcagaagaccagttgaagcgcctggctaaatctacaagcttaatgattgtctgcccgagctttagttcttgatctgccctgtactccgcccgtttgaataaataatcgtatattgtctcgtctcgtgaatctttaaatggcagccgaggcaggaccacataccccaaaccttgcatatccatgccgctcacctacttcctttcacacagtgctgtcagagccttgaaatctatttctactaatctcagagacggctcatttgtctttaagtagtcagtcgtgtaccgggtatacaagtcctttctcaagtcgcgctgaaccgttttgaccagccagagataacaatgcgggataggaatcctgatcagctccctttccatcagctcaccaactccgaaaaatggatgatgctgttcagttgattagtagcccggcaatacttgcatttttcgcaccgctccggcttctctccgccgtgtttcacttgcaaaatccggtccatccgctgctcaatctcctcaagctctacttccatcctgccttcatcaatattgatgacagctttatcaggtggatcttcttttgaaacccctacgatcaggggctcaagccattcgctccgtccagtcatccgtttttcaatctctgcgtaaagcgccatctgagcgatgtatccgtatgcctcaacaaaagagcaatatcctatttccgggtcccaaactttctcccgcaatgaccgcgctgttttcagatcggagaaacggccgccagctgggttgtatacgtccagctttcctttccatggaacaccaaacaattcagcagttacgatgacttccttttctccttgaagaacaaacatacagagatcatcattttgaatcgcctcaatcatcagatcagctaactgatactgcttgtacagctggcctttttgtgtaaaaagtgatggggtgttttttttaaattcatcaaaagccggttcaccctcaagccaggcatgaacgtattggccgaagaggagcgcctccgatgtgggcggcatccattctccgttcaactttgccatcgtggcagcctcgcattgcaaaaagcttttatattgagaatttgacatgtagtgtctatcaatctcgttagagtaataattctccttgttcagcgccggtatccgcattagcaggatcacccgccttttctttactatcagcaggcttgtcagcttgctctttcagctttttgaattcttcctcagcctttgatttagtcgcgctagtggccttcacattgaagtaatcctctttctttgccatcccatcacgcagggacgtgtaaatacgaccaattttcaagaaatcttgctcagtgaaggcatcaacgttactgccgatgtactcctgaatcatttccttagtgatgccaaattcttttttaaatagggagaaggcgcttctgagccggtcttccagtggttccttatgaccgctaatcaatgttttttgacacatatctaccgccgcatcaacgatgtcgcccggaatcactccaagtatgcaggcgcgaacccggcgagctccttgattggcaaccatttcgtaaatatccctcggatcatcaagtttggtaatggagccccgcgccttccgttcatgctttacagtgaaaattttggtttgcctggtatttgtttcaagatcccaagcgtaagccatgacagatgattcaccggccttttgttccaactccataattccgtaatcaatgttcccccaattctgagccaaggcctccgccagccggatagatggaccggaaacctttgtgccgccgcgaggatattcatacaccgcattctctgccaacagcctccgttcgcatgcttttttaatccggtcaaacgctgcgtatacgtcccgtgggaatttctttgcgatgaccattgccgcctgtacttcttgagcctgtcggcttaccatcgcttctgtagtcacgccagtagcctgctggggcgccggcatgtaatctgagtaatctacctgcgataatccattcattgttctgccacctttctcaaataagcttctgtgacgagccgctgccattctcggtatgcgtccattgacgggaaggaaaataccggtttgcctttactgaacatgaccgagccgccgacttgtctcagacgcttctgatcgtccgctcggtcactgaaagatgctgttattcgttttgccatgtgtaaaacctccattgtcttttatgaggtaatttggtataataaaggaactaatctttaccaaaagaccttttgaagtccactctgccaagtgggctttttttattgtgctgaatgaaacctaaatccaagttgctccttcaaatagcgtttaagattgtcttgtaaaatcacttcgccgctgtcaattacataattatctgctgccgttacttcatcaccaaaaaagtccttttttgtttccggttctgtcgttttatcatgccagttgttcaggaccattggattttcaatattcatcgtgaacacctactcgcaacattcagttgaatcccgcgggctgccatatttaaaacggtttggtgtaagcgtcctttattcgccagccggttaatatcctctgtaagaaccttgatgctccctgcaagactgatagcttcttcgtaatcgccatcccgtaacgcatccgaaagcaagatagagagctcttccgccgactcgatttttctttttgctgaatctgcatccgatttaagaaattgattgattttcataccaacaatgcctgcctttcctctgtttttgccatcgcaacctgattcactagcgctttacgggtccacctttcggccagttccttcatgttcaggccatgactgcgggccagtgaatatatcagcgttttgtttgctgggatcagatcaaaaatctgtttaatatcggccattggcagttcttccgcctgtcggcctggcctatcatttgccagccagcgcgctaaatgctttgttgcctgcaatgcttcttcaagctggtgaatcatgttgattaccgctgtgcttgcactctcgttaagagctgggtctattggagccgccgttgtcgggtgcagccgaaaaaggtaatgtactagatcaatatgttcataggcctcacacgcctcaaaccatctgatgcataattcgggagtaagcttactaaaaccattttcaacatcggaaacgtatcgttgatccttcccgcctatcaaacatccgatctgatattgtgtaaatccagccgctttacgaacaaagcgcatgatcttcggtaaattccgcaagttgtacggattgttctccatatgtttgcctcctgatatattcagctgtatgctgttaaaatttaattagggtcaaaagatgttttattgtattggcttatgatttttcgaatatccggcctcatggctctaaacttcgctttgtggccacaataaaaacaaatattcactctatagagcctctttcatgattgcttgttcttgagcttcgatccatgcatcaatattgtgtttggtaaagaaaatgcgatttcgcacacgaaagtgaggaatttgtttttctcgaaccattgtgtaaattgtgtcatggtgaacacccaggtaatcagctgtttcctgcacagttaatgtattgcgtgtcatactcggcctcctaagcagtgtgttctttactcgtttcgtgtaacttttgatcaaaaaaaagttcatctacatctttattcaacaacttggatatttgatgtgctttttcaagacttggttttgtacgacccatttctatattcgcatacccacttacagatctgtatccgagctttttagccataaaggtttgggtctttccttgagaaattctagtcgcccgtaaattttctaacactatttaactcaccgccttactctttttgtgtaactcattaaactcataataatatacacgttaagggtaagtcaatatatttttattctttttgtgtaagttattatctgttgtgtgtaaaccatgttaaaatttacacaccaaatgaaaaaaggtgtataataatggataatataacagggaaaattctaactgaattaagagaaaaaaaaggttggagcaaatcttttgtcgcaaaaaaattgggcattaaaacaatgtctacatatgcgaattgggagtacggcttaaggaaaccggatggcgagatgcttgtgagaattgcaaagctgtatggtgtaactactgactatctcctaaccggcaaagaacctaatgcttttaatactgacctttttgatgatcctgatttacaactcgcctttagacaagctcgtgatttctcagaagaaagtcaaaaacaagcaattgattttattaagtaccttaaagagaaagaagaacgcgaaggccgcaagcctaaaaagtaacaactgccgaaacctttatttatattatttattatgttatttctgtttactaataagatcgggattggatcgggattagaaccgaactggaacgggaaagcatttttcattagtaggttgaagccagttatatcaagggattcagcaatcgtcctcttctggattgcttcagtattcaaactggaatggatcagaaaaaagaaagacaaactcggccgtgactacatataaaggggaaattaatttggcgtttttgttcactaatgaggaagtatataacagtgcctttggaaaaaaacgcagagcttcaggggctttcaggaaaacttattatgcagcccagccattattggggaagaaaaaccaagtaataatggaagctatattcggtgtgttaaatgacaaaaaattcggcactcaaggtttacttattgctaccaaagaaaacttatatcatattgcagataaagctggtgcccatagaataatcagctggtcatataacgaaattacgagcatcaccatcttaaaggaaacatttacagggtttcagatagatctcaaaacccataaagaggaattcttgattaagggaattcaagaaggggatcatgataagtttgtcaactacgtgagaaaagaaatacaaactgctcaaaaaaataatgatccgtcccctgcccagtccactcaccagtatttatctgattttgacatgatagcttcagaaattagaaaatatgctgagttaaaagaagaaggtcttttgacagaagaagagtttacagcgaaaaaaaagcagcttttaaaattatagtggccctatgggcttttctttcacaccaaaaacagaacatacattccctctatggtggtgtttttaatgtcaatccagttatcgtatcttgaagaagaagtgaaaaaaatctattacaaattaaatattgagactcctgaagacattgatttagaaaggattgccgcggcatttcgtatctggctgcattatgagcaaagagaaagctgcatgtttcaaatcaacggtgagtatagcgtcgtccttgatgctcgtgcctctccacaagaacagtggcaagactttgttcatgagctatgccatgtcttaaaacatactggaaaccaatttcacatgaatagaatgttcaggcagcttcaggaataccaggcgaacagttttatgtatcacttctgcgtaccaacgttcatgctcctaaaaatgcagctgccccgtcttaaatcagaagtcattaaattattaggagatacatttaatgtgacatattcctttgcggctaaacggttagaaatgtatgagagaaaaaaattttcagataaaatctattcaatgaggtgtaaaagatgggccattggatgccaagaggtaaaaagtctttcttattagtagttgagaatggatacaataccaaagggaaacgcgacagaaaaactaagactataaaaatcgaagacccaaagattcttaacagcacaaggaaaagagaaaaatatttaaatcagcagcttcttatgtttgaaatggaagtcacttcaggagaatacatatcacctgaaaaatcaacgtttgaatcctttgcaaatgaatataaagaccggatcttgtataaaaaattcgctcaccgaacatctgaaatgcatgaaagccatataaaaaactatattgtaccctcaatcggtcacaggagattagatcaaattaaaacaatgcatattgttgattttatggattccctagaaaaagacggaattcgtaaagacggcaaagcaggaggtttatcaagttcaaccagatacgatatattcaaagttttgaaagcgatgtttaaagttgccgttaaacaatggaaactcattaaatcagatccaacagaagatttagatcctcctactgttgaaaccaaagaaatgcaattttatgattcagaagcagctaaggagtgtattgaggctctgtatcagattgatataatgtggagattgtattttttaggcgcaatgattggcggtcttagaagagcagaaggattagcctttgaatggcacttagatgttgattgggatgcgggaggtttttatgtaaatcgttcaattccaaaaacaattgacggaaaaccgcttatcaaagatcctaaatcaaaaaaatccaagcgctttgtaaagatgcctgattggtatatggatgagcttgagaagtattatagaatgtggaaaaaagagaaactgagattaggtgatgcttgggaaggtggagaacatcaatacgttttccatagtgggaaaggaaagccctattattacacaacccccaccgcaaaatggtccaagttcaccaaaaagtatggactgaaaaaaatacgactacatgagttgcgtcacacaatggttactttattaattgaagccggcgcaaattatagagcgattcaagaacgagtcggtcacgccagttatcgaactacattcgatagatacggccatgtaacaaaaaaattaactgatgagacagctgaatttttcaacaattttgaccctaaaaagagatacggacaataaatttcgagccaaaaaatcaaattcgccaacagtttgccaacaacttccgaatttgataaaccggccttattaagagaaagtaaaaaacccttgctacgcaagggttctggctatgattccgactgggctcgaaccagcgacctctaccctgtcaaggtagcgctctcccagctgagctacggaatcatgatatgtatgtgttgctgggtatgttgttgtctctctgacatttataattatatatcctgatttctcattcgtcaacactttttttatctaaaataaaaaaagggcgcgtcacaaaattgacgacgcccttttcgtttatgatctcacttgggtgggggttatttttttcaatgcctgttcgaagtcccgctctaaatcttcggggttttcgactccgacgctcaggcgcagaaggccgtctgtgatgccgcgtttctccctctctgctttcggcatagcggcatgcgacatggctgcagggtatgagagaatggattcgacggcgccgaggctgacggcaaataccggaagcgatacgttttcgaccagctttttgacggcttctttgctttccaattcaaaggacaggacggcgcccgcaccgctcgcttgacgtttatgggtatcggctcccgggtgtccggcaaggccgggatagtaaacgtttttgacggccggatgcccgtcaaaataggcagccagccgctcagccgtccggctcgctttttccagtctgacctgcaatgtttttaagcctctcaatacgagccagcagtcctgaacgccgagcaccgctccaaatgaattttgcagcttatacagctgattgccgagctcttcatcctttacggcggcaaggcctgacagcacgtcgctgtggccgcttaaaaatttcgtcgcactgtgaagcacgatatctacgccgagatcaagcggccgctgcagagcaggcgtcatgaaagtattgtcaaggtatgtcagacagccgtgatcctttgccagtttgacgacgcccttaatatccgtgatgccgagcgtcgggtttgacggtgtttccatataaatggctttcgtgttcggccggatggcgcgggcgaccgcttctgtgtccgtcatatcgacaaaggtatgttcgattccgaaacgggacagaacctcagtcaccatgcggaatgttccgccgtacacatcctccgtgacgaggacatggtcgccttgggataagagcagaaacgccgtcgaaatcgccgccattcctgagctgaaagcaaaacctctcgttccgccttcaagacctgcgatcgtttcttcaagcgctgttcttgtcggtgtgcctgagcggctgtagtcatatgtcccgaattcttcaaatgaagactgatggaatgtggaagcatgctggatcgggacgctgacggctccggtggctccgtctgttttaaatggattgtgcacgagctgggtttccagcgtccaattgtgattactcatatgacacggccccctcttttacttgctgtaatgcctgctttacatcccgcttcaaatcttctgcatgttcaatgcccactgaaaatctcagcagacggttgcagacgccgtttgcgatacggatgtcttccggaatgtccatgtgcgtctgcgtcgcggggtatgtaataaagctttccaccccgccgagactttctgcgaaacagatcgttttcagcgcctttaaaaacggattgacccattcctctttttgcagccggaaagacagcatcccgccttttccgggatataacacgtcggcgatttcttcttcctgttctaaaaattccgcaagttcacgggcgttttcttcatgacggcgcattctgagtccgagtgttttcatccctctcattaaaagccacgaatcaaacggcgggagaacggctccgatcgcattttggtgattaaacatgatctcgccgagctcttcatcctttacgacagcaagaccggcaaggagatcattgtgcccgcctaaatattttgtggcgctgtgaatgacgatgtccgctcccagttcaagcggacgctggagcaccggggtataaaacgtattatccacaatcaaaagcaggccggcttctttcgtaatccgggcgattttttcaatgtccgcctcctgcattaacgggtttgtcggcgtttcaacaaataccgctttcgtgttttccgttattttggagcgtaaacagtcttcatcgctgaaatcatcataaataaagcttaagccgtattttctccattcgttttcaaacaaacggtacgtgcctccgtataaatcggaggatacaatcaattcatctccgcttttaaataaagccataatcgtttgaatggctgccattcccgagctgaaagcaaagcctctcgcaccgttttccaacacggcgatagcgtcttcaacgagctggcgtgtcgggtttttcgtacgcacataatcaaagcctgtagattctccaattcctctatggcgataggcggtggacagataaatcggcggactgaccgttcccgttgcttcttcgcttctatttccgatttgggctaattttgtatcaacatgctgcgtcatcagtaagcaccatcctttttcaaaataaaaaagccccctcttcataagaagaaggagcttttctcttcctcttatcttccaagcatgtgaatcgcttgctggatttagcaccttggcactttgccttcccgcggcaaagcaaaccggttgctgaggtttcaaagggccagtccctccacctctcgtgataagaatattgttttgtattttctgattgttctatattaacgcactataaaatgaatttcaataactttttatttatctgaactctcgcaagaagtgcatctgaagaaagaaatttctaataattcatggtacaataggaaaaaaccatcaagacaagaagcggcctggaggaatgcgaagtggcatcaaaaaacggaatcattcatgagaaaaaacttttctcccatgagcttgaagaggaaatgaccgttttggtctacctgcccgccaccttctcccccctgtataaatatcatacgatcatcgctcaggacggccatgattatttcagattagggagaatcgggcggcaggcggaagagcttatgtcaaaaggggaaattgaccgctgcatcattatcggcgtcccttataaaaatgtgcgggagcgaagaaacacataccatccagaaggctctaagttcgcctcatataagcgatttatcgcaaatgagctcgttccttttatcgacaaagaatacccgacttatcaagtcggatacggccgcaccatgattggggattccctcggcggaaccgtttcgctcatgacggcgattgactatccgaacatgtttggaaacgtcatcatgcagtctccgtatgttgacgggcacgtgctggatgccgtccggcagtcggaggatctcaaacagatttccgtttatcatcaaatcggagaaaaagaaaccggcgttcacacgacagacggccaggttcttgatttcaccgcgccgaacgaagagctcaaacagctgctggaaagcaaacagtctgaatacacgtatgaaaccttcgacggggatcataaatggacctactggcagccgctcatcacgccggcgctgaaaaaaatgctgtaaccattcatttaaggagggaactttcatgaaatacggtattgttttatttccatcaaaaaaattacaggatctcgcaaattcgtaccggaaacgctacgacccgagctacgcgctcattcctccgcacctgacgctaagagatccgtttgaagcgacagaacaggaaatcgagcaggtcgtatcacaactgagacagacggcgaaagagtcgcatccgctcgttctgaaaatcacaaaatacagctcgttttctcctgtgaataatgtgatatatatgaaagcagagccgacggaggaattaaaatctctgagtgagaaatgctactcaggagcattatccggcgagccggaatacagcttcgttccgcatgtcacggtcggccaaaagctgtcgtcagatgaacattccgacgtactcggacagctgaaaatgctggacatttcccacgaagaagtcatcgaccgttttcacttgctctatcagctggataacggctcatggactgtgtacgaaacatttttattaagcggaggagaataactgcttggaatccatcatcgcaaaaactgaaaaacagctaaacgacgcttttttcatcagaaaagaggtctttgttaaagaacagcacgttccggaagaagaagagattgatcaattcgaagacacgtcagagcatatagtcatatatgacggcggccagccggtcggagccggcagatggcgcttgaaagacgggcatggaaaattagagcgcatctgcgtgatgaaaagccatcgttctttaggcgtcggagccatcattatgcaggcgcttgaaaaagcggcggcagccaagggcgccgacagctttatcttacatgcgcagacgcaggcggttccgttttacgaaaaacaaggataccgcgtcacatccggcgaagaatttctcgatgcgggcatcccccatctggaaatgataaaggaacacaaacgataaaatcaaaagcactcctgttatatggcaggagtgctttttttatgaaaataatactatttcatgaattttattgcattttatggaaggttaatgtatgtttagtatgcgaagtattacaattcatacaaaaagtacaattcatatttcggagggataaacatgacggcaccaaaaggaaaacacatattcgggactgttaaagtgggtacaaaaggacagattgtcattcctaaagaagcaagagatgttttcgatataaatccgggggattcactgcttatgctcggagatgaccagcaaggtatcgcacttgttaaacaagaactctttttcgagtttgcaaaagatattttaaacgctaagcaaatcgatgaagatagcgaggatgagtaaatgcacgcgattgagctgaagcaattaacgaaacattataaagaaaccgccgccgttgaccgtcttgagttctcagttgagaaaggggaatttttcgctttactcggtgagaacggagccggaaaaacgacattaatcagtatgctttgcggactcctttctccggatgacggtgatgcatcagtgcttggacacagtattttgactgatttggataaaataaaaccgaaattgaatatgtccccgcaggaaacagccatcgctcctcatctaaccgtacgggaaaacttagagtttatagccggagtctacggaattccgaaaaaagaagcaaaaaaaagaacagatgagatgctcgaattgtttcaattaaaagagaaagaaagagcaaaaacaaaaacattatcaggaggaatgcagcgccgcctcagcatcgcaatgggaatgatcaccaagccggatatttatttcttagatgagccgacattagggcttgacgtccgttcacgccgcgagttgtggaaaaatcttgaggcattaaagggtgacatgacgattattttaacgacacactatttagaagaggctgaagccctggcagatcgtatttgcattttagaaaatgggactttaaaagcactgggtacggcggaggctctgaaaaagcaaactcattcagccacatttgaagatgcctttttagcgatttgtgacggggaggcgggtctttatgcttgatttcgccattcgcaaccgcaaagaaatttttcgtgaccccctgtctattatccttggaatcgcactgcctgttattctattgtttctgtttacggcgattgaaaaaaatgcgccgcttgatacctttaaaattcagcatttagcacccggactcattgttttcggttttgctttccttacgatgttctctgcattgctgatcgcaaaagacaaacagaccgcccttttgacccgtttgtttgcttcccctttaaaaacagccgattatgtcatcggttatgcaataccgatgctgccgttagccattttacaaatcgtcatttgttttatcgcagcagcggctgccggtttatccgccgagtggatgaatcttctcgcaggtatcgctgtcttgctgccgattgcgatgatgtccgttttcttcggtttatgtttaggggctgtgtttacggacaaacaaatttcaggcatcggaacgatttatattacactcgtgcaatttctgggcggggcttggatggaggtgagcctgctcggtgacacattcaaacatatcgcttatgccttaccgtttattcactcgatcgagctggcccaggaagtcatatccggagattattcttcctttcatcagcatatttggccgatagcgggatataccgttttggcgcttgcacttgctttcctcagttttatgaaaatcaggaagagataaaaaaagccggcactccgtaatgggagcgccggtcttctttattacgtttctttcagaaggcttatcgtatgcggcagcagacggtcatcccccggactgccatggcccggaacgacaatgctgatgtcctgatatcttttcatgactttgcggacggcgcgcggccactgatccggataaaaacccggagtaggcacgatttcctttgtttctaaagccttgattaagcatccgccgaataagagcttatccttaggcagccagacggtaatattgtcttccgtatgcccttttcccggataaaacgtttcaattttcatatcgccaaactgcagctttgtcacgtttttcaaatctccgagcggccggtcatatccctgctgtcgggcgaagtcggcggtcagtttcgtgctgtgcacctttacaccgtatttgtacagggtgttcagaccgccgatacgatcatcatgggcgtgtgtcacaatggcatcggtcatccttttgccgggaaaccgcttttttatttgtgtcattaattgctctgtgagactgtcattccacggagtatcaatcagtacgattcctttggaagtctcaagaagcaatccgttcgcagggacgggatttccgtctgccgtaccggtgcttgtatgcatccaaacatgcggcgccagctgtgtgagagtgacatcttttgctgcggagctctccgccgcgtgtgccggtttcattccggcagtaaagaggccgaatagaaataaccccgcaattaataatgaaagctttctcaaattgaatcattcctttccgcatctttcatatatacgacctcaaaaaaacccggatatatccgggctttttcacacgtattgatttatcaaccggccttttcccatgatttgcggcagacgggaaagagagcgcttacgtttttcctcatgtactttcttttctgcggctgcggtgttttcctggcggcgctccacctccctgtacaccctgtcattggcaagggcggccgctttcgtaatgccggcataatcagacttataacccgctgcccggtttgcgtattgagaatactgctggttttgaatccgtcctgcataaatcatatgtacccctccccttcgcttttcatttcccttaatcttactttttgaaacgctgttcttttgttatgatattctttgtctatcaaatggatgaacaccttttaatgggaggacccctttttgaaatgcgcccgactgaataaccgaacgatacatttacatacatattctagagaacattaccaattcctttttgaagaagctcagaaaggaaatattttttgcgcacattgtgagcagcccgtcttgatgcggctttcgattttagagcagccggcattttatcaccggcaaaagggagacttcaccgcctgtgaaaaagcatgcgcggccgaggaaccacaagcggagaaagaaaaagaagagtataaggaagccggcatgttccgcctgccgaaaggaaaagcgatttcagagaatccgaaaccgatcgtctcagaatggaaaagcccgaaaaaagtgcctgcggccgaaccgttttcaccaacatccgaggcggctgatacatctttgttccccggcatcggcctgaaccgtgaacagatgaaggcagttactgaaacggacgggcctttattagtgcttgccggagcgggaagcggaaaaacaagggtgctgacagcacgcgccgcccatatgattgaacacctcggcatttcacctgagaatatgctgcttgtgacctttacgacaaaagccgtcgccgaaatgaaagagcggatggcgaatgagtacggtctggcagccggaaaagtctcccgtctcgtgaccggaacattccacagttttttctataaaatactctgtcattatgattcttcaaaatggaacggcagccagcttttaaaaatggagtggcaaaaagagcaatatgtgaaaaaggcgctctatgaagaaaatttggatgaaaaagagtttcccgtcgaccaggcgcttcagcttatcggctgctggaaaaacacgtatctcccccatgagaccattccgcttgcggacgactgggagaaaaaagtgtacaggctttacgaacattacgaacggcagaagcgggaaaaacggcaatttgattttgatgacatggcccaaggctgttatgaactgtttcaaagccggcctgatattctcgcgcagtaccaaaacagattttctcatattttgattgatgagtttcaagatatcaatcctgtccagtacaacattatgcaaatgatcgcaagccctgagaataacctgtgctgcgtgggtgatgacgaccaatccatttatgcgttccgcggcagcagcccgtctttcattttagattttcagaaagattacccggcagcaaagaccatttacttaacggcaaattaccgatcgcctcatccgatcgtctcaagcgctcatgccgtcgtaaagaaaaataaaaaacggtatgaaaaaacactttctgccgtcaaagacggcgttcacaatcccgtgatgttttatccttacgatgaagaagaagaagcgaccatgatcgtttcggatatgaaagagaagattcaaaacggggcgagtcctgacgattttgccgtactttaccggacaaacagcgccggacgggccatttatgaaagactgcatcaatcatcgattccttaccatgccgacaggggcgtgcagacgttctacagccgcagaatcgtacgccagatcctcgcctacttatatgcgagtcagaatgaagatgatccggatgcggtgaaagacctgctgcccgccttatttttaaagcaatccgccctgcaaacgttaaaggcgctgtcaattacggaagattgcacgatgattaaggcactgacgaaactgcctgacctgaagccttttcaaatagggaagatcaagcagatcgttccgtttttcgcaagcatccggacaatgaagccggttgaagccatcacctttgcagaaagcaaaatgggtttttccgagtatttaaaaaaacggggcaatgagggaaacaaactggaaaaaggctctgatgatctcagggatgtcaaagtggccgccaaaaaattcaaaaccattcccgattttcttgcgcatgtcgatcatatgcgcgccgctgagaatctgaaaaccgatgaaaacggcgtcgaactgctgaccattcaccgctctaaaggtcttgaattcaatacggtctatattttaggcgcggctgacggctcgatcccccatgacttcgcacttgagacggccagacagggcgatcccgctccgctcgaagaagaaagacggcttctctatgtcgcaatgacaagggccatgcagcatttatatgtatcttgtcccgcgtacaggcggggaaaaacagcgcgcagctcaagatttctcgagccccttcttcggacggacagacggagcgcactcaggatataaagaacccggcagatcactgccgggttcttctcacataaaaaggcctttttagcaaggccggctgacgcctatttattgttcagcattttagaaatggtgccaaaatcaagtttctctttaccgcttgtaatagattgaacgattttgtcttccaattctttcggaacacgcttgttagccagctgggacaccttctgaatgacgcctctcaccgtgttttcatctttgaaattggcattttgcaatgatcctgcaaggttcatgacatccttcatgctgacgcctgttttcttctcaatatttttgaaaaattgattatccatggtgtgcctccttttgtggagtaatacgatattgtatgaataaagagcggaacatgtgcccgtaagacaaggaaaaaattccgagtgccccgtctctatactccttcatacatcagggaagcacgggactgaacggtcccgcgcttatccaaggtcttgctaaggtttagccaaaaaaggatgcaccgacaatgatcagaaggatgaacaatacgacaacaagaacaaatgttgagccgtatccgcctccgacatagccgcctccgtatccgccgcagccgccataaccgccgtagccgccgccgaatccgccatatccgaatcccatatctaagcacctcctttactccctatactctatgtgagccgacttgtttggcttggataaatgcatagggccggtgcggatttcattcattttagtgagaatgctcatttttcttcagttttgcttctgtttcggcggcaaacacatctatccattcctcaaagcgcgatcccgcttcatcaaactcagacagctgtttttcaatagataagatatatttgtcatgctcccgctggttttgattgtgccggcggtatttaccgtttatgaatgattcaaatatattcataacatcccctcctcctatgatctatgccgaacagaggccggcgttcggcaaaaaacaaaaaaaccggaagctccggttttttagaaaacggctatttcggttttttcttttggccgcagccgcagccttttttcttgatttttttttcgtaaggctgatgcacagttgatttgtatggagaatgttgggaaggtttgcttgattgactcatggtgatccttcctttccttatgtcatatatgccagtttatgccgaaggtgacggtaagttgctggtggaaccgccttattcctgcagaagacgagaaaccgcagcttcaatgatcccggccgcgccggctatggctaacagcaaaatcagccattgcgcagcctcgggtaccacaatctggaccgcaattaaaaaggcggcacaccacacgcccgtacaccagtagcagctgagaagttcaccgataaatgccctgatgccttttccttttatgacaatgtaggtttctgtcgtgccgtcgggtgcggtttctgttttttcctcgtgaaaaaggctccgaagcggcgccataatggtgtcaaatacgaaaagcctggccagccggaaaacggcaaacgataacagaataaatgaaagccaattgataaccacctgttcactccttttcaaaacttgacctctttatacatatgcgaaaaccctgatcttcatgaatcgcaccttgtccggtaaaaaaataggtgcggtttagttgtttttcttattccgctcggcgtttcatttgcattatataaagtatgaatgagaaaggagtgaaggttatgtcgtttgaagaaaaagtcgaaacactgcaaccgcaaatatacgaacaattatccaacgaattcgagcagacgatcgaagtgattgattgcgaaaatgtcacaatagatacaacacatataacggccgctctttctatacaagcctcagttactacggcgattatcctcgcgacacagctcgcgatcgcagatgaagacacagccgaccaaatagcaaccgaactgctgatcctggatgattgccaaataaaaaagaggaccgtcattcaagtcctgaacagccgcaatattaaaatcacactgactgcagacgatattatggcctttgtacaaattttgtttcaattattaaatatactttttgctgaactagacatcctttaacctttcttttcaaatatttaaatagaggtgagaataaatggcagataacgaaaaattaaaaaaagaactcgaaaatctaccagaagtggatccgcttttaaaggtgcttgtcagcaatgtcttcaaaaaacacggcgtgacaaaagataaaatgcgggaaattcctgatgaagaaaaagaaatgctgatcgcattagtcaaagacatgcaggcaaaaacagaagcttttcttgaaagccagaaacagaaaaaagagcagggaaaagcgcaagatcagcagaccaatccgcaaacccgcagagaacaattaatcgaacagctccggcaaagacgccaaaatcccggtcaataactaaaaaatagtgatttttatcaggatagatgcctgagtcaaagtaaggggccggctcatttaataatagtaaaagaaaaggaggaatagatatggaaagcagaccatactcttgggttgcacttgatcctgaatgcgaacatccgcgagaagaaaaagaagaaaaagaaggcagaagatgtaatgtttgctgtaacggacatggatttggcgaagataatgccttccttgaccaagaccttgctcaagcgaatatcaacaaacaagtttctgaagaagcgattattatcagagactcttgtgatattaacgtgacgtcaacagacgttcaagcagtcgcttcagtcatgacagcgattaatgcagcagtcgtaacggccactctcacttcaattgctgacggagtcatcgctgaattggtcgcacaagacttattgcagctaacagctaacaaacaaatcaaccgtcaaaaactgctcatcgaaaactcccgcggcgtaaacgtgacaacagtagatgccgatatcgcagttttgatctcaacagcgacaaatttactgattgctgtcttagtcatcacccttgtcctctaaaaagaaaaagcagagctaaaaatgctctgctttttcttattttctccgcatatgatgaatatatagacgttcacccacaccaagtgaggctcgcgtacatatgttgttaaagacaaaagtcaaataccctaaaagaaggagctgaaatccatgagctgcggaaaacaccatggccgagatgaaagttgtgtatgcgatgcagtcgagaagattttagcagaacaagaggctgttgaagaacaatgcccgactggatgctataccaatctgttaagcccgacggttaccggtaaagataccatcccgtttctcttgtttgataaaaaaggcggtttgttctccacattcgggaacgtcggaggctttgcggatgacagccagtgcttcgagtctattttcttccgggcagaaagagtttgtgattgctgcgcaacgctttcagtattgcgccccgtagatgtgcacggcgacaccctcagcgtctgccatccttgtgacccggatttcttcggtttagaaaaaacagatttttgcattgaagttgatctgagctgcttcagcgccattcaatgcctttcaccggagcttgttgaccggcctgagccgcacaaagagaaaaagcatcacggatagtcattgattcgcatctttcctaaagaagaatccccttccaaccttctattacagatgcaatcatcagcccgcccggatttccgggcggctgactctccgatatcgtttaatccggtatataaaacgtgaagtcaggagggatattatgagcaagcatacaacatactgtgtgcgtgaagcggtagaaaatattgaagacctgcaaaatgcggtcgaggaagattgcccagccggatgcttttccaaccttttatcgccgggtttttcattaggcgatacagtgccgtttgtgcttttcacttctaaatcatcaccgtttaccgcattcggaaatgtcggcgagctggataacggtccgtgttttaacaccgtttttttcagagttgaaagggtctgtgacggctgtgccacattaagcctgcttattgcttttgacgagcataagcacattcttgattttacagataaagactctctctgcgatgtattccgtttagaaaaaacgaactattgcgttgaagtcgatctccatagcttctgcgccattaattgcctgaacccgagactgatcaaccgcacacattcttaaatcaaaaagcataaaaataagctgccggattaagaattcaggcagctttttgtatggttaaaatccaagcggatgcagcgaggtaatatcgtctattgcgagttctgccggcgctccgttgcttgtcgtccgcaggaagatcgcattattttttctgccgacgattacgcctctgtaggttttcccgttggcttctatcagacaaagggtccgcggcatattatgcggcagcttcgttaagaaatcaattttttcaagaatggacattctgctcatcggctttttcacgcgctttggcggaaccttttcctctggggcggcattgtgaaccgcttcaggctctttttcagcggcatcaggctcttttttagcggcgtcaggcttggcagtgtcctgctctgcttgcgccggaacttcttgaacggcttcttctgcgcggctgtgctgttcaggtacttgcttttctggttcaacagccactgctccttcaggctgagtttgacattcttcctcccgctttccatgcatcggctcttcttccggcggctgaggcgctttcctttttttgattaatatgtcctgcattgatgattgcgtgtctgaataatccgcctgaacaatatacatgagcggttttttttccgcgtttctgttttgttttgacatcttcatccctccgattctgtcatgttttatttatatgacggaatgattaaaatcagaagaaagaaaaaagcaatccctgaaagggactgcttgttatttaacgtgcggtaatatggaatcctgaatcaacgtgaagattttcgcccgtgatgcctcttgacaggtcactgaacaagaatgcagccgtgtcgcccacttcttcaggtgttgtcgtgcggcgcagcggcgcgcgctcttcaatttctttcaggatggagttgaaatcactgattccttttgcagacagcgtacggatcggtcctgctgaaatgctgttgacgcggatgttttcttttcctaggtcagcggctaaatatcttacgctcgcatcaagagacgcttttgccacacccattacgttatagtttgaaacgacgcgctctccgccgaggtaagtgagtgtaacgatgcttccgccttcagtcataatcggacgcgccgcttttgcgaccgctgtcagagagtaagaactgatgttatgcgcaagcaggaatccttcgcggttcgtatttaaatattcgccgacaagctcttctttgtttgcgaacgcgatgcagtgcgcgatgccgtgaatcacgccgacctgctctttaatgctcgcaaagcaagcttcgatctcagcgtcatttgtcacatcacacggaaggatgatggaatcatttctttctaatgtagccgcaaggtcatgaactgatttttccaagcgctctcccgcgtaagtgaaaatgaggcgcgctccggcttcatgcagcgaacgggcgattccccatgcgatactgcgtttattggcaacgcccatcacaacgatgttgcggccttcaagtgagaaattcatatgtataaagcctcctgtaatcgtcttaaagacatagttttagtacctgatcttaatttttatcatatcataaccttgtccagattgaaagcatgggaaaaagaccgcggatgttgaagcggtctcttttttatctcgtctgcagactgttccttttaaaggcaaaatgattggtcgggccgtgtccctctccaatgccgagcgtatgttccacggcttcccgcacaaaattgacggctgtctcaaaggcggtctgaatgtttttcccctttgccgtttccgccgtcagcgcggctgcgaacgtgcagcctgttccgtgggtgtgtttggtgtcaatataggcgtggctgatttgggtaaaagacgaaccgtcaaataataaatcaacgatcctcccttgttcaggctggtgtccgccttttatgatgacatgctttgcaccaagcttgcaaaggcgttcggccgcttttttccggtcctcaaacgtgcggatttccattcccgtcaatacctcagcttccggaacattcggcgtcaccgcatagctgcgcggaattaacagctcttttaacgcggcctgagattcctcacgcagcagggaagcgcctcctttggcaatcatgacggggtccgtgatgagatgatcaagcccgtactgatccgttttttccgcaatttccgcaatcatttctgcgctccacagcattcccgtttttacagcgtcaggccgcaaatcttccgccaccgcgtcaatctggctgcccagcgcttcccgggtgagcggataaatgccgtgaacgcccaaagtgttctgggcggttaccgctgtaatggctgacattccgaaaacgccgagctcctgaaaggttttgagatccgcctgtataccggcgccgcctcctgaatctgatccggcaatcgtcaatgctttgcatatgctcatgatgtttttctctcctttcgcattatccgatccatttatgataaaaggatttcgctctgctgatatcacttgtgccgtgtattaatgctctgccgtcacgaaacagtaccatcttgaaattgtctttgcaaaacgaaattaaatacgggttggctgaaacatcaagccctgtccgtctgagctgtcccgcaagtttttgcagatcaaactgttcagagatccccgctctgatctgcaccgtgttccgcccgcacagaaccgccgcttttgtctgattttcataggataaaaacggataatcgttcgtgccgcagcttgggcaatcagccgacttaagacgggcgacgtttatttctgaccgttcatttttccataaatcaaaggaacggagaacatgctcgatagatccgcccgttaacagtttcagcgcatctgctgcctgaaaaacggccgtctgcaatacagccgggctgatgattccccccgtatcgcatgtcataccgcctaaaggcaatgtctcaagcagacaatgaaggcacggcgtgacaccgggaatgacggtaaaagagagcccgtagctgccgacacaggcgccatacagaaagggaatccctttctgcacagccgcatcattcacaatcagcctcgtttcaaagttgtcggcggcatccacgatgagggaggcgtcacgaatcaatccgggtgcgttttccgcagtgacatccatgacaaatccctcgacctctacatcactatttatagatcgaagccgtttttcagccgccgcggctttcggcatttcatttcttacatcgtcttcggtataaagctgctggcgctggagattactccactccacataatctctgtcagcgatcgttaccttcccgactcctgctctgacaagcatctccgcacttgccgtcccaagcgcacccgcgccgataatcacggcatgagacgaccggagcttctcttggccggagggaccgatcggctgaaacagctcctgtctggaatatctgtccgtcataccggaagaccgtctcgcggactgcttgcagttccgtaatctttcaccggaattctccccgcttcataagaaagacggcccgcttctacggcaagcttcatcgcccgggccattttgaccggatcatcagcgcctgacacagcggtatttaacagcacaccgtcagccccgagctccatcgcgtaggcggcgtcttttgaagatccgacgccggcatcgacaatgatcggcaccttcgcctgttcaatgataaaggatagattcagcggatttaaaattccctgaccggaaccgatcggcgaagcgcccggcataatggcatgcactccgagctcctcaagacgtcttgcgagcacaacatcatctgacgtatacggaagcacgataaatccctcttcgagcagctgttctgatgctttcagcgtttcaaccggatcaggcaaaagtgaccggctgcacccgatgacttctacttttatcatgtcacaaagccctgaagctttggcaagccttgcgattctgaccgcctcttcagccgttgcggcgccggccgtattcggcagaagcgtgtatttagacaaatcaagctgttcaagaaagttaggctgagactcttcaaagatgttcatccgccttaccgcaaaggttaaaatatctgattccgagacagccaccgcctctttctgaatctcaaaactcggatattttcccgttcctaacagcaatcttgactgaaactgttttccgcctattgttaacatcctcatccgcctcctacaaaatggacaatttctatgacatcgcggtcacacaaactcgtattttcataattctttttttcaatgatttctttatttctctccacaactacgattctttgatcaagctggtacgattcaagcaaatcctgaaccgtcccctcatttcgattccaatcaatttgttttccgttcagctgaaggatcatatatgaacagcctccttgcgatcaattcgaaacgcttcttcccattcctgcttaatctgtcttcccaggatcatatcccgcaccatttcagccgttgccggcgccaacaggatgccgttccgaaaatggccggcggcgaagatgatgccgctgtcttcaggatgccgcccgataaacggctttccgtctcttgttcccggcctgagacccgcccaaaaccggtctattttcatatgttcgatggcgggaagcatggttttcgcttttgcaatgacggcctcaattcctccgatgtcaggcgtatcgctccagtcgccctgtttcatcgtggcgccgatgacaagccggccgctttttctcgggacgacataacaatgatcatggtaaagggttttggtcagcgggatatcgtcattccacacggaaaggcattctcctttcacaggaaaaaaaggctgtcccaagccgagctggctgaaaaaccggccgctccatacaccgcttgcaactgcgactttgtcagcataaacatcaccgccggacgttgtgatgcaatattctccgttcacccgttttacggaggtgacttgtgtatgctcatatatgtcagcgccatagcgccgcgctccttttgcatacgctttgcaaacatagtacggttcgacatggacatcgtcttttatataacttgcgccgagaatgtcttttgaagcgtaaggctctttttcaagggcatcttcggctgaaagccaggtgacggaaggcagatcatccatcttccgtagacggacgatatcttcttcggtatacgccagtttaagcattccgccgttatggcgcctgatgtcaatgccgcaagcttcctcaagctcttgccccgccgtttcatacagcctttgactgtacatggcaaaatcaaaaaacgcatcccggttttcacattccgcatgagcgcccagcattcccgcggcagcgcttgtcgtttttcggccgacttctccggcttcaagcaagacaacgttctgctgcgtcttcgccagctcataagaaatggcgcatccgataattccgccgccgatcaccgccgtatcatagtgcttcttcataatcggcctcccttaccgcgcgtgcataccgttttgccgcctcctcaggattttcagctgagaatatacctgacatgacggcaattccgtccggtttcgcctgctttgtgtgtccgatcgtctgcagtgtcattccgccgattgcgatgacggggatggaaagcgtgcgtttgatctctgaaagcaggctgatgcctcttgcttcaagtccttgtttacattcggtttcaaatacatggccgaacaccacataatccgcatcttccttttcagcttggatggcttctttcagcgaatgaaccgaacgtccgatatgaagatggggaaatctgcttcgcacctgctttacggaaaagctgcgggacggaagctgaacacggtgtatattggcaaaaagcgcgatatccgccctgtcattgatgatcaatttgtccttatccgcaccgccctttttcaaaagggtcaaaagctgcatgatttctcccgctgttttatcccgctcacggatatggataaagcttacttcgcgctgaatcgaaagaatatcttcggccagctcggcaacggatttgcgattatcagttaccgcgtgcagctccaaaagattccacctcttttccgcccttctcggaccagccttctttttgataggccattccccaaaattgatattcataatagcttgaaatcacaaaattctctttcattttcgcgcggatgtcctctgtgctgttttcagcaatctcgtcaaaacggctgatctgttcttcgacttgctgtctgaaccagtctccgccgtatgtaccgatccatttttcataaatcggatgctccggtttgcactcctttaagtgttcgccgacttcataataaagccaataacagggcagaagcgcagctaatatttctccaaaattgccgctcatcaccgatctgtacatatgagacgtataagaataggcggtcggtgccggtttaaatgccgcacgctcttcttccgtaatccctaaaagctccgtaaactcgcggtgcagcgccatttccgcttcatatgtcccttgagcgtggcccgccatcctgcccgtcgtaaacaagtcttcggcatatgcggcgccgaacgcctgaacttttgcaaaatgcgtcaaatagtaggaatcttgcagcacgtaatagctgaaacggtctatcggcaggcttccgtcaccgattcccgttacaaacggatgaacaaaacttccgtcccaccattcggcagccgcctgtctgcattcttcagaaaatgtcatcatgtcttcccccctgataaaataaaaaaaccactttcccgcatcggaaaagtggtttggaatttaaatggataaaaggaaccccaaaaaaataccgctccacttccctacgcaggtctgaacctgttcaagttatgagggtctaaaagtctcacttttatctcagcccttatgaaggacacccctagtggtcatacgattaatgatttatttgttatgccttctatattatcacgaattgcaatttggtcaagcttcaaggatttttctcagttccgacacgtagttgcgcgagcccgtgacgatgagacggtctcctgttttcagccgcgtgtctccgtgcggaacgatgctgtccacacctctgaaaatccggacgaaaatcacatcgcccatcagcggaaattcccgcagaatgatgccgttatacgccgggttttccagattgatctgatataacgaagactcctcattcgtcaggaggctcatcacgcccggcgcctcaattaatgcgcgcaagagcgtctttgtagacagaaggatagaaaaaatactgatgccctcttctttcagttttgtttcatgctcaaccgagccgacgcttgcgatgatacgctcagtccctttctctttcgctattaaggcgatttcggcgttcacatcttcatttcccgtcgccacgacaagaatatccgttttgaaaataccgtgcgactcaagcgtgccgggctcgtaatcagaaatcgtgtcaaccgaaaaaacggattccgcaagcgttttcccggcattttcctgatacacatggacgacccgtacttcatattcctcatcgggcaattccagcgtaaccggaagtgtcatttggttggcgccgataaatgtaatgcgctttttttcctgcggcgcactttgccgtttgtataatttcttaaagccgatcggcgtgatgatgctggcaataaccgcaactaaagtcaacgcgccggacatattggcgctgataatgtggagcctttctccgatcgtagccgccgcgataacaagcgacagcgtggacgtcagcaaaaagcccgaagcaaacacggttcttttgtcataccatttctttaaataaaacaccggaaacattttgctgataaacagcgcaagcagaagcagcggaatcatcgttaatgttttcggatcttggaaaagcgtccaaatgtccaatttcaccccgaccatgacgaaaaagatcggaattaaaaacccgtagccgaaggaatccagctgttccaccatttctttattcggagacagaagcgataccagaacgcctgccaaaaacgcgccgagaatattttccgccccgagagattccgataaagcgacaagcacgataatcagtgtgaaaatggctctcgtgccgatctgcacggtgcctttagacatcgactgcacaaatgaacggtgtttaaagatcctgccgaagaaatacagcacgacccccgcggcaaagagaatcaacagaagccacatatttccgctgtcttctccgtaaagagaagagaagaaagcgagcagaatcatcgtagccaagtccgcgataacggcgacaagcaggatgatctggccgatattggagttcatgatccgttcttcctttaaagtcgggaccaccacaccgagtgatatcgtcgaaataataagcgtcattaaaaatgcgttttgaataaaaccggctaatacaaaggcataggacagcagcaatgataaaataaagatgccgaaaaagataatcagtgcggcagaaaacgtgttgggcgcttccttgccattcggaaggaattgttttttcttccctttctcaaatgaagaaaaatcaatttccaagccgcttaaaaacattaaaaagataaagccgagaacagacagcgtctccagccacgtgtctccctgaacgacaagattcaggccgctttttccgataataagccccatgatgatctccgcgacgacgacggggatgctgagcttaaaccgatgtaaaaggagcggcgtcaaaaaagcgatgatcagaacgacgactaaagatgcgactgatgtgtgttccattcgtaaatacctccttaaaacaagggttataaaagcccgcttaaagcgggcgaaaccttacttttttttaaaaacataacgcatattctaacaaggctgaacgcgaaaaaaaagtgataaggctttatttctttaattctttttttaatttgtacaaaaacagcgtaattaggtataggaattagccgcataataaataaaaaaccgttaataaggaggctgacacgaatggcttatgacatcatcagcgatatacacggatgttatgacgaaatgatcgcgttaatgcaaaagctcggatatgaagtcaaagacggaacgcccgttcactctgaaggcaggacgcttgtctttgcgggggatttaacggacagaggcccaaaatccgtagaagtgatgcgttttgtggcaaaagcatatgaaaaaggagccgtccgttatgtcccgggaaatcattgcaacaaactgtatcgttacttaaaaggaaaccccgtaaaagtgatgcacggactggaaacgacggcagccgaactgaaagagctgtctcccgccgacagaacggaagtctccagacaattcatccgcttatatgagtcagcgccgctttatgacattttacataatggcgatctcgttgtcgcccacgccggcataaaagctgacgatatcggtaaatactcgcgtaaggtaaaagaatttgttctgtacggcgatatcacgggtgaaacgcatctcgacggcagacccgtcagaagagactgggccgccgcttatgaaggcaaggcatggattgtttacggccataccccggtaaaacgtccccggatcgtcaaccgtacaatcaacattgatacaggatgcgtcttcggcaatcaactgacaggctttcgctttccggagcatgaaaccgtctctgtggaaagctcaatgccctatgatgcctcacgatttcgcgaggatcacggaaggcaggcatgaaaaaaagcccgaaaccggcaaacggttcgggctttacatttgttcaattaatgttttcatatcgtcaggcaccggagcgtgaaaaacgagcgtttttccggtcatggggtgtacgaatgaaagccgctcactgtgaagagcctgccgcgcaattccctcattttttccgccgtacagtgtatcaccgactaacgggtggccgaggtagctcatgtgcacccggatttgatgcgtccgccccgtttccagccgcagggctgcaagcgtaaacgcatgtcccgctttttccgtttgaaaatgcgtcaccgctcgttgtccctccggcgttaccatccgctcaataatactgtcgtgttttcttccgatgggcgcgtccaccgttccttccttctgagacatgatcccgtgtacgacagcgagataccgcctgctgacaagcccctttttctgcgctgccgacaaaagagaatgggaaagccgatgtttggcgatgagcatcgcccccgatgtatccctgtcaaggcgggtgacaagatgaaccgttgattgcacaccgctttttcggtagtggctgatcactccgttagcgatgctctccgacgggtgttctcttgatggaattgaggagacatacggctgtttattgaccacaagcacatggtcatcttcataaagaatatcaagaggaaccggctcaggcaaaagcgtttcactcacatgctccttcggaaattcaatcttaagcacgtctccttccgctaacacggcgcggacggttacatgctctccgttcacaagcaggtctcccccgccgaatttaatgtcagcgagaagccgctttgaaatgccgagctgcgccgtatattcttttaccgtcatgccggcttcccgggcagtcatgttcttttggataaaaaagttgtccaatccgtttcctctttctattcgccttttccgataaaggaatcctgcacccttttccaaaacggaaaaggacggaatcttgcaaatctgactttttcatttgccacacggcatagaatggacttgacatccttatgcagcaaggttaaatgatcaattgtgacttgaaagtcgacgtcgtttctcggtttgatgacacagttatgatgatcgggaagcaaaagcggcgagccgacagtcctgaacactctgttgttgatggatgccatttccgcaagctgaatcgctctgatggaagggtggatgatcgcgccgcctaacgccttattataagccgtgcttccggaaggcgtggacagacataaaccgtctcccctgaacgtttcaaacagctggcctttaatttccacgtcagcgacgagactgccttctatgcttttgatcgtacattcgttcaaagccagataccgctcctcacgctcttcatcatgataagtgacaatcacctcaagaaggggatactccacggtatgatacggcgttttggcaatggccagaacaagtttttctatctcctgcggaacccaatcggcataaaaacccaaatgccccgtgtgaactccgacaaacgccgttttatcgagacggtcgctgtacctgtgaaatgcgtaaagaagcgttccgtcaccgccgacggaaatcacgatttccggctctttttcatccaaggtcatatcaaaatcgagtaaatacgcctgtattttgcttttcagtgtatctgaaacctcgtctccttttgaagaaacggcaaatttcatgccattcccctcctttcctactggtggtctcccgcttttttctttcgcgagaacgcggcttgggcttcctggatttctccgcggatttctgacatttcttcatcgagccgggatgcggcttctgaggcccgctgcagcctcagctttactttttcgggaatgttcccgctgtatttgtaattcagtgaatgctcaatggttgcccaaaagttcatggcaagcgtccgaatctgtatttccacaagaacgtgcttttctccggacgttgtttgtaaaggatataaaacgacaaggtggtaagaccgatatccgctttccttatgctctgctatgtaatcccgcttatcgacaacggtaaaatcttttctggcaaacagcatatttttgacgatctggatatcatcgacgaattggcacataatacgcagccccgcgatatcctgcatcgtttcaatctgatgaagcggtatgctttttcgtctcgctttttcaagtatgctcgccaccggcttcacgcggcctgtcacaaactcaatcggtgagtggtcatcttcatactcataaagggttctgacgcctttcagcttcacctttaattcttcaacagcctggcggtatggcgctagaaattgctcccattgtttgtcatccatcgtacatcccccaattccgaacctgttctaaagaaatacgtttttcactttttcttccatatctccgtagtttgcattatctttaatattttcaagaagataatcgagttcttcatgcagccctgaaagttcaaccgtttttccgccggcctcaaggaccgccggttttctttggtctaaggcttctttcagatccggccagatatgttcttttataatgacatattcaaaagagtcagctgattcaagtatgtatacaaaagcaaagtgatcggaatcaacaagcatttgacctgatgctttgcgttccgctccgcttaagtcctctccgcacttcaagcggagcgcgtcttctgttaatgatgcattttggatttcaattctcttttgcataatgttctccttttttaacaaagtacagcatttattttatcatatcaaggtcgatattgataaacgtaacctctaaagagataatgggaattatacaatttttcgtcctgaaaggaagactgtcatgacccaagaaatagaaattgaattcaaaaacctgctgacaaaatcagaatttctgaagctgagtgaagcactctgcatgaaagaacatgattttaaacagcaggtcaatcattatttcgacacgaaagatttttccctgaaacaaaaaaaatcagcactccgcatccgagaaaaagacggcgcgttcgttctgacgttaaaagagcctgcatcggtcggtctgctggaaacgcaccaagagcttgcggcacctgatcttgacgtcttcaagattccggatggccccgtcaaacgtcagctggaaggtctcggaatcaactcagaacacatttgctatttcggaacgctgtcgaccgcacgcgcggaaaaagaatcagaaaaaggcttaatcattttagatcacagccgatatttagagaaagaagactttgaattggaattcgaagctgctgactgggatgaaggaaaacgggcgtttgaacaattgctcaagcaattcggcatcccagagcggatcacgaaaaataaaatccagcgtttttatgaacagaaacaaaaaaaggtggaatgacacagtgaatatcacgaattgggcggcccttctccagctgcaatcaatctctcatacaagcacggcttcaggcggacaatcttcagaaagcccgctttcaaatttcagcgcgctgctcagccagtatacggacacagccgtccggcagcagccggaatcaggaattttaaacggtgtgcggaccgctcacgcttcatattcaccgagaattcccgtttcatccggctccgcggctgcttcacagaccgcttccccgggcataaagtctccggatgcggcttctgatatcagcaccggaaacttttcaatagacagcgccattcagaaagcggccgaaaaatacggagtggacgaaaagctgatccgcgcggttattaaacaggaatcaggctttaatccgaaagcggtcagcggtgcgggggcaatgggactgatgcagctcatgccttccacggcagaatcactcggggtgtcaaacccgcttgatcccgtccagaacgctgagggcggcacaaagtacctaaagcagatgctcacgaaatacgacggaaatgtatctctggcgttagccgcctacaacgcaggccccggcaacgtagatcggtacggaggcattccgccgtttaaggaaacacagcaatatgtcaaaaacataaccaaacagtattacgcgtaaaccagagaggcttccttcgccctctggtttttttgcggagtgaaatcttacacatgaatgaaggcgatgtgatatgatatgaaatacaagcgcctgacagaaaggcactttgtttgtagaaataaaatgttattgctaaaatatacagtaactgaagatagtaaaactgaaagataaattcgcaatgggaattatgattcctattagccatataaaggagtagtcaacatgggacaatcgtttaacgcaccatatgaagcgattggagaggaacttctatcgcaacttgttgatactttttatgagcgtgtctcgtctcatcccttgctgaagccgatatttccaagtgatttgactgaaacggccagaaaacaaaagcaatttttaacccagtatttgggcggacctcctctttatactgaagagcacggacatcccatgctgagggcaaggcatctcccctttccgattacggacgagagggctgatgcgtggctaagctgtatgagcaaagcgatggatcaggtcgggctggagggcgatattcgtgaatttctgtacgggcgtctggaactgacggccaggcatatggtaaaccagtcagaagcggaggatcgatcatattgacgaattatcagcatgagcaatacttcgcccattgccacggacatccaaaaaaaccgctcgaaatttacatgtttgtcgaccctttatgtcctgaatgctggtcgctggagcccgccataaaaaaattaaaaatcaaatacggacgtttttttacgctgcggatcattgtttccgcgagcattacatcgctgaataagcataagcggaaaaaacacctccttgccgaagcttgggaaaaaattgcgaaccgttccgggatgccctgtgacggaagcctttggcttgagcaggatcagcctctttcatcgccctaccttgccgcactcgctttaaaagcggccgaactgcagggaagaaaagcgggcattctgtttctccgcagcatgcaggaaagcctgtttgtttccaagcagaatattacggatgaagacgttcttttagaaattgccgaaaagacgaaattggatgttgaagaattcaagcgcgacctccattcgcaaagcgcggtaaaagcgcttcagtgcgatatgaaaatcgcggcggaaatggatgtcaccgtcaacccgacattgacgttctttaacagcctgcatgatgatgaagggctgaaggttcccggcaactattcttatgacgtgtacgaagagatcttattcgaaatgctcggggatgaaccgaagccttctgaaacgccgcctttggaatgtttcattgaatatttccggtttgtcgcatcgaaagaaatcgcactcgtttatgatttgagtctagaagaagttgaaaaagaaatgaaaaaactggcattcgccaaaaaggtcgccagagtggaagcaaagcacggtctgttttggaagtctctttccggcacccaggaggatgtcacctgttgtgatcattaaaaaaagctgattccttacggagccggctttttttgtgcaaataaagaaaccgcgccgggataagcgcggtttcatatgtcttaacgacaacaaaggggatgggagaaatttttcacggtcaaacaaaggggtaatgtttgtttgtgatcaatttcacatccttatcatatcaaatcttgtcgagttttgacaagccataagattaatgttcatatttttgtcacaaaacataactgactgcttgttttcatagaatatatcaatgaaaaacaaggagggaaatcaatgctccgcaccgtattgatcatcggaatgattgtgtttttcttctttttaaatctgctggccatgatgcacatgctgccgatttacattacatctcccctgctgtttctgtccatattgtttgccttgtaccggctgaatcacagaaaaacgtttaaagggttttagaaaaagcctgtgcaacttatgcacaggcttttttgaactacgaagggttcactttcgaaagaagctcttccatttcgttcagtttctcttcaaacattttgcaggctgcctcgatcggttcaggcgatgtcatatcgactcccgcttttttcagtatgtcgatcggatattccgagcttcccgcttttaagaattcggtatagcgctccaccgcaggcttgccttcttttaagatctggctgctcagcgcttgggccgcactgtagcctgtcgcatattgatacacataataattgtaatagaaatgcggaattcttgaccattccagactgatttctttatcaatcaccatgttgtcaccgaaatactttttattcagatcataataaagttcgttcagcagttcaggcgttagcggctcgccttcctgcgctttcgtatgaatcagatgctcaaattcagcgaacatcgtctgtctgaacactgtgcctctgaatccttcaagcatatggttgagcaggtacagacgctgtttttcatcctttaagctgttcagcatatattcaccgagcagcgcttcattggtcgttgaagcgacttcagcgacaaaaatgctgtagttaccgtacggatacggctgatattttctcgtatagtagctgtgcacggaatggccgaactcgtgaacgagcgtaaacagattattgacattgtcatgccagttcatcaagatgtacggattcgtgccgtatgtaccggacgaataagcaccgctgcgttttcctttattttcgtatatatcgacccagcggttttcaagtccttcttttaaaatagacgcgtattcctcgcccagcggagcaagtcctttgagcatataatctttcgcttcctcatatgtgaccttcattcccgaatcttttacaagcggtgtgtaaaggtcataaatatggacttcatcaaggccgagaacctttttccgcaggtcaatgtaacggtgtaataacggaagatgtttattgatcgttttaataaggttatcgtaaacttcttcagggatgctgttattggataaagccgcttcccgtgctgatttatactttttcacacgggcgtaaaaattatcttttttcacagtgccgctgagtgtagtcgccatcgtgtttttatactgtccgtatgttttatatacggcttcaaatgcgtttttgcggacttcacgattgctgctttccaggaaattaataaagttgccgtgtgtgatttgagtttccttgccgttttcatctttaatcgacggaaacgtaatatcggcgttatttaaaacactgaatgtattggaaggcgacgacagcgcttctgaggcttccgcaagcagggcctcttcttgttcgctcagcacgtgcggacgctgttttgtaatttcttcaattgcatgggagtaaagtttaagctcctctttttccagaataaactggtgcagcttgtcctcctgaatcgccagaatttccggttcaatgtaagcagtcgcgctggcagcctgagaatacaggcttgcggctttgtcgttcagcccttggtagaaagaatttcccgtatcctggtctgagcgcatatgtgcgtatgcataaagtttgccaaggcggttcgtcacttcatcctgtgccgtaagcgccgcgtataaattatcagccgaatgagcaagcgtgcctttaaaagaagataaattcgggattaattctttaactgcttgaaattctttattccaggcctcatcactaggaaaaatatcctctagtctccatgtatgctctgcctttacttcacttctgtcaggcagctgtgctgctttattttcctcagtcatggtgatccccctcgttttctttacttcaagccaattgaaaaaacgattgtttctccaaaaacttgtgttgtgattatcttccggcttttcactgccttttgtcaaatcatatgcggcatataagaccaagcataccaataatacagtgaaaaaacgaaaacaaactgcttgtacgcccctcacattcgccaccaccttgacgttagggtgaacgaaatgaagcattctcattccccaaaaaagagcagatcccgccggcgcagctcttctgccgtttgagggagcttccgttgagatgagggcatatatacttcattctcaatttcccttaaaaaatcctgcaagcataagaaatcagcatattgttttaccgccattctgataaggctatcttgtgaaccataccgcatccggatctccttacgcctgattttttgccgcaaatcatgaaccatgccggataatcggatcggcgcgccttttttagaaagttccgcaagccgcaagtataaatggctctgccacacaaaaacgggacttgcaaacacaaagcccgctgaaacgggaataaacacttcagaggggagaaatggaaatgcgacctgatgtctttcgtaaaaaagacgccggataagaccggcatcttcagataaaaaccgcccgcttttgtttcggaagccggctacggcacgtccccacgagggaagtctgacgctgtgccgcccttccggatgacatatgtctttcaggtttgctttatgaagagggattgtggttaagccggcataagaatagccggtgtaaaacggagtgatggaatgcagcctgtaaaaggagcgggcgtcgggacagtaaaacagtaaagaggaaaatgaatggacttcaaagaactgccagtgaaaagcagaaagccggaaaaattgcccggccatccgttttaaccgttttgccccgatgatccagaccggccggtacccggcgtttttcaggcctgccgtccggctctttaaagagtccgccgaaaggttcgcacattgaaattcaaaagccagcctctcttctccgctttccgccgtcaagtcaggccgctgtccagcggaagtcagatacggttccaggctgacgctgcacccttgtgtctttagccagagaaaaagctgcctttttccttccagatggtattcgctttcaggttcggattcccccggacacagcctgctttttttatgagcgaagtgcggcagtttctcccgtcccagtttgatatcaagttcactttcgcaaacggggcagaaccagcgtttctttctcagctcctccgctttttcctttgaatagcttccggccagctgaatgagccgtccgtcggcagtcacagcactgaacatgttgcatcttctcctttcctgaatcttgttgtattcagcaggaagaagatataatcctgtttgcggatgagagccgttatacggttttcagccgttcatcctgtcattcagaacaaaaaaaaccgatttctgctgagagaaatcggtttgttatgatgcaaagtgtttttttattgtatataacgcatgatcagcgatcaccaatttgccgtattcttcaagacggtgaatgctgactgatgattcgtgcgcgtactccaacaggatgcttagctgattttcaacctcttcatcagtttgctcataaaaatctgcatataaataatatcggtcttcaaacgaatacagggtcgttttgattccgttaagattcaattttgatagcgagatgagatcctcaaaatcatcgaaccgcaaagtgaactgaagcttttgctccttatcttcccggctctcggcctgctcttctttctggaaatcatcaagtaaagcatcgagattttcatctgccggctcttgttttttatcttccgggatcggcagttcgagtttttgtccgtccttggaaagctgggcttttgttacgattatttccagtcctttgtccaatgcctgaacctgaatccaaagaggaccctcgacagcgaattcctcttcatcatgcacttcatccatgacttcccagaacagttcttcactgcgctcgcgattgtaccagatttcttctctgtcaaaaccgcgatcttcaatatcaccataagacatataaaattttacagtatgctcattaattctttctatttccattttgccaaccttcccttctttataagatgttgaagggacatctaagctcccgatgaatagtactttactacactttacccattccgtccacatcttaaccttatagaagacagcgcaaattctttatatttctattttatgataaaacagttataaaagaaataaaaaagcattttcacaccgaaaaacaggctttctcccggttcccatcataaatagcgcaccgcttcatatattagctgtacaagcaatcgatctataagcgaggtgttaccatgccgcacgattacctgctgtcccttctgctcattatcggaattgaccttattctcggcggtgacaatgccgtcgtcatcgcgatggccagccggaatctggcccataaacaaagacagcaagcgatcatcttcggaacgtttatcgcagtcgtcttgagaatcgttctgacgagcgctgcggtctatttattgaatgttccttttttgcaatgcgcaggcggggtatttttattgtatctcggctatcagcttctgattgagaagaaagatgcgcagcatgtgaaaagcagttcttctctttggaaagccatccgcacaatcgttatggctgatatctttatgtcgcttgacaatgtcatcgcagtagccggcgcttctcacggtgagctgacacttgtagtgatcggtctcttcatctcggtgccgattatcatttggggcagcaagctcgttcatgccgccatggacaaaatgcctttattgatgtacgccggaagcggtcttctcgcatttaccggcggtgaaatgattgccggagacagcaagctgtcatttttcatggcagaacacggcattatacaaatgacgctgccgattttgaccgtcgtatttgttatcctcgccagtatgatttaccaacagactgaaaaataacaaaaagcccaaaccgcgatggttttgggctttttccatgcttatcgtaagcttatatcagttggcaagacgctgtgcttctcttaattggaaagaacgcacttttcttggcaggaatcgtctgatttcatcttcgttatagccgacttgcagacgtttttcatcaatgataatcggacggcggagcagtcccggatgctcattgatcaaagtatataagtcttgaagcggcatagattcaacatttacgttcagtttctggaatactttagaacgggtagagataatttcatccgtaccgtcttcagtcatacgcagaatctgcttgatctcatcaattgataacggctcggagaaaatgtttctctctacaaacggaatctcgtgctcttcaagccaagctcttgcttttctgcatgacgtacagctaggtgatgtgtataatgtaaccattaatcttcactcctctaattagtaggatgaacatgtttgtattctcaaattgaaatgactttaaaaaaggaatctttataggtattatactataaaaaagtaagtgtgaacagtctcctgagaaaaaaatgtgtcaatccggcaaatttacggctggcggatgtttccccattctcaattagctcagctgatcgaaaatgttttttcgttttttctcatcaatgactttgagaacttcatccgttttttcgtatgattctccgtaccatttttcatctttataagtgtgaatgttttcatatgtctgtttcattgcttcaaacatttcttcttctgattccgtcttaggtgaccagtacagaatctccattttgttcacttcattcgtagccaatgaccggcgccgatacccgattgactgcgcgtgcttgaaatgctctctttgataaaaacgcaagcgtttctgtgtatccgtgtcatcctcgtcaacaggctccacctcaagcagaatcggcttgtttttctttttcagcctgccgatcagcttgcttccgaggccttgtcctctggatttctttgacacaaacaggtaatcaataaagatgaaagagtcaaattccgcatacatcagcacgtggtactgcccctcttctttatgataaacatcgctttgctcctttaacagagcttccatatgcgcttttgatttcatttcttcaatcggaaaatattcactcagcttttcgtaccagttcattcatttgctccttatgggttcgttgtcttcacacttttagatataccccatttccgattgtttaaacaatcttacatctattaagacgtgtgatcctttaacatggtttcaatttttttaaaatggtgtgtaatcgacgtttttggtatagcggtttgccgcgtcccacaataaaaattcgtcaattccttcatcatgcagcgctttaacctggtcttccacctggcgttttccgtacttttgataatttccgctgccgagatatgatgccgtgaagtcctgaagccacggacgcgatacaggcgggtgtttcagcttagacagttttttatgttccaccttcgcgtattctttgacgactttgtaaggctcaagatccggtttatcaatgccgaaatagcttgtccaatggctcggataaatcatggatgaaatgacatcgacctgttctgaaattttgctgaaattctggccgataccaggcgcttccggcagcgtggctgaatagccgaaaatatcaaccgacacatccgcgccgtacggcttgagttttttcttcgcataaccgacaaaatcggtgacggcgtgaacacgtttttgcacattgctatctgctgtttttccgtaatcgccgtgaccgtatgtcagttcgtcatcacgtttttcaaatccttcaggaaaacggacataatcaaactgaatttcttgaaaacccatctttacggcttgttttgcaatctttacattgtaatcccatacttctttcataaacggattgacgaacgattcgccgcggccgtttttccagacacttccgtttttttctttaaaggaccactccggctttttgttcgcgagttcgctgtctttaaatacgacaatacgcgcgatcggatagatctttttttcctccagctttttcatcatcttttttgggtctttgatgtacggcttggcgattttggcatactcagaatggccgtccggcttaaaggtgaggtttccgttgtcgtccttgacatcaatcaccattgtattgagctccgttttgtccacaaagtctgtcagctctccgaatttgcttcctcccgctgaatgccctgtgacgtaaatgccccgcaccttatcaggatgtgaaaaatgcagccctgacggataagcgaaccgtgcatttgatttcggcagttctttttcggccagcgctatttttacaagcggctgctcctctttcgcagcggcgtgggccggataagcggctgcactgataaacagtcccgcacaaatggcgcacaaaatggttttcatactgatctccccctttttttccattatagaaaaacgggagcaggcttaataaacttgaatgtgcgcaaaaaaatcctccaagactgagtcttggaggatgatacgtttatagataggttttaaattcagcttcagtgcacataacaaaatgtcccggtttcacttctctgaattccatcttttctccgtcttgcagctgatgaatggacggatcgtatttctttcgcgtgcgatttctttcatagtccggatcagggagcgggatagcggacagcaatgatttcgtgtatgggtgaagcgggttttcgtaaagctcatccgccggcgcaagctccaccaattttccgaaatacatgacgccgatgcgatcgctgatgtatttgaccattgataaatcatgggcgataaacaggtaagtgagccctttttctttctgcaattctttcattaaattgacgacttgcgcctgaatggagacatcaagcgccgaaatcggttcgtccgcgatgataaactccggatcaaccgccagcgctctggcgattccgatacgctggcgctgtccgcccgaaaattcatgcgggtagcggttggcgtgctctttatttaaaccgaccgtttccagcagttcgtgaacccgctgcatccgctcttttttcgtttttgccaggcggtgaatatctattccctcggcaataatgtcggcgactgtcattctcggatttaaagatgcgtacggatcctggaaaatcatctgcattttccggttaaactccagcagcttcttgcgggattttttcccgtggacattttccccgttaaagagaacttccccgccggttgcctcatacagccggataatgctgcggcctgtcgttgatttaccgcagcctgattctccgacaaggccgagcgtttcgcctttataaatatcaaatgacaaatcatctacggcttttaccgttcctttctgcgtgaaaaaatgctgttttaagtgtttgatttcgagaagcttctcagtcatttttttcaccttccttcattaaaacaggatgctgatacgtattcggaagctgacggattttagccttcaccgcttcaggcggctcgaccttaggcgcatcaggatgcagaagccacgatttcacaaaatgcgtatcagacactttatacatcggcggttcctgttcaaagtcaattttcatcgcatatgagctgcggagcgcaaatgcatcccctttcggagggttcgtcagatcaggcggcgtgcccgggatggccgtcagtttttcctgatcggtgctgtccaggctaggcattgaggcaagcagcccccacgtatacggatggcgcggatcataaaagatttcatccaccgtgcccgattcgacgacctgacccgcgtacatgacagcgacccggtcggcgacattggcgacaacgccgagatcatgcgtgataaaaatgatagacgtatcaattttcttttgcagatctttcatcagctcaaggatctgtgcctgaatcgtcacatcaagagctgttgtcggttcatcggcaattaacagtttcggatttgccgcaagcgccatcgcgatgacgacacgctgtctcatcccgcctgaaaattcatgggggaattggccgatccttttttcgggcatcggaattccgacgagatcaagcagctctatggcgcgctttttcgcggcttcacttgagattttttcatgtttgaaaagcacttccgtaatttgtttgccgactctcatcgtcgggttcagagaggtcatcggatcttggaaaatcattccgatgtcctttcccctgatggcctgcatttctttttcagacatcggcacgatatcgcgtccgtcaaaaagaatctgtcctcttttaaagtagcccggcggcatcgggatcagcttcataatcgcttgggaggtcacactttttccggaacctgactcccccacgatcgcaagcgtctctcctttattcaaatggaaattcacgccgcggattgcctgtacctctccgccgtatgttttaaatgaaatggctaagtcttttacttctagcaaacgtgtcactcatatcactccttatttgcgtaacttaggatccagcgcgtctcttaacccgtcgccgacaacgttaaagccgaacatcgccaggcagataaagccggcagggaagaacagacgccaagggtaataggttaatgcaggcaatccgtctgaggccatcgttccccagctcgcaagcggcgcaggtacgccgaggcccaaataacttaaaaacgcttctgtaaaaatcgccgtcggaaccgtcagtgtcatcgttacgaggatagagcccatcgcgttcgggacgatatgcttaaacaaaagccggccggttttggcgccgagtgtctgtgaagcaagcacatactcctgattctttaattgcagcacctgtccgcggacgatcctcgccatattgatccagcccgtgatcgtcatggcgacgataatggtcagcaatcctttcggcaggacaaccatcagcaaaataaccattaataatgaaggaacagcccacagaatgtcggcgatgcgcatcatcacttcatctgtgcgtccgccgcggaatccggaaatgctgccccagattacgccgattaataaatcaagcacggcagctgcaacaccgataaagatagaaatccgcgcgcccacccatgtccggacgaatatatcccttccaaggtcatccgtgccgaaccaatgatctttcgacggcgctttatccgcatttaatagattggtagtggcataatcataccttgaaaagacaggcgcaaaaatcgccatcagaataataagaacgatcagtacgaacccgaccatcgcaagcttattgctgcggaagcggagcatggcgtctttccagagggaaaggctttttttatttattttttcggcatcgccggcattagctgaagctggttcaaacatatttttaggaatgttctgcatggtctaggctcctttctttgctttggaaagcttgattctcggatcgattaatccgtacagcacgtctacaattaatacgcataaaagcagaagcacgctgaagaacacggtaactcccataatgaccgtataatcacggtttgtaatgctgtttacaaaatgcgcgcctaaaccgggaattccgaaaatggattcaatgatgaaacttcccgttaaaatggatgccgccatcggccccatatatgtcacgaccggcaaaagcgcgtttcgaagcgcatggcgcacggtgactgacggacgggaaagtcctttagctgttgcagtccgtatgtaatcgctgtttaacacttcaatcatgcttgaacgggagagtctggcaatgaacgccatcggcatggaagcgagcgcaatagagggcagaaaggtgtatgcccaggattcccaccctgcgaccgggaacagttctaatttaattgagaaaatatattgcaaaatcgtcgccaatataaagctcggaactgagatcccaaagatcgttaaaatcgcaatggtataatcctgccatttattatggtacagggcagcaagcaccccgaaaagcacaccgaacgctaaagcgaggagaatagcttctgcaccgagagtgaatgagacggggaagcctgaattgattaaatcattaacactttggcctttatatttaaaagaaggtccgaagtcccacatcgctacagattttaagtagctgacatattgaacgaaaagaggcttgtccaggccatagtgttcgtttaagtttgcctcaatttcaggcggcagctttctttcgccggaaaatggtccgcccggcgctgcctgcattaagaagaatgtggcggtcacaatcacaaacagcgtgatgatcatgtaaatgaatcgtttaccgatatatttcagcaaggtgaacacctccatgttttttacaattttatacttaatcagtaagaaaggtatatggggacatcctccccatataccttgggtcttttgttttcagaaccgtcttttattcaaaagaagcatttctgaagtaaacttcgcctgttcctgtcaagatcacatttttgaggtttttatcctgcacccaaggatccgtatagaaataaactggcgcgaccggcattgcgtcaataaagatcttttctgcttttttcagctcttcgatacgtttatccggatccgtttcaagctgagattggttcagcagctttttaaactcaggatcttcccatccggtatcattgtttccgccttctttatcacggaacaattctaggaagttgatcggatcgttgaaatcgccgagccagcccatacgcccgatttggtagttctagctgtgcagcttgtcgatgtaaacattccattcggagttatcaagctcaactttgacgcccaagttctttttccacatttcctgtacggcctgcgcgattttcgcatgcgcgtcatccgtattgtaggacagtttgatcgccggaaggtcagaggcattcttgacgcctaattccttcagtcctttatttaagaattctttagctgatttgacgtcattgtctttgaaataaccttttgtgttatccttgaatcccttcattgacggcggcaccgcagccatggccgggatctgttcgccctgcgttacatttttcacgatggacgagcggtcgatcgcataagcaagggctttacggatgttgacattgttcagcggtttctcttctgtgttgaatttgtaccaatacacgcctgcgatcggttcaacgtgaagagatccgtcttttttcaatgtcggcagagattcagtcggaagctggccgagcggcattcctgcccagtcaagctcaccggcctggaattttttcagttcggtgttgttattgttaatcatcaccatgttgattttcttcaatttcacagcgtctttatcccaatattgatcgttcttttcgagcgtgatggaaccgctgtgtttccaggccgtcattttgaacgggccgtttgacacataattttcgcccgcatttgtgttccagtttttatgtttttccgcgattttcttgttgatcggcatatacgtatagaatgaagttaattgcgtgaaataaggtgtcgggttattcagttcaacctttaatgttttgtcatttacggcttttacgcctacatcatcaatctttccttttcctgtattggcagcttcagcgcctttgatgtagtagagctgataagcgtattgtgattcgttgttcgggtcaagcgcccatttccacgcatattcaaaatcctgcgccgtcacagggtcgccgttagaccatttcgcaccgtcacgaatcgtaaatgtataggtctttccgtctttgcttgtttcaattttagatgccattccttcttcaggctcacctttggagtttacgcgtgtcaatccttcaaaagtctggcggattacgcctcctgaaacggaatcattcgctaaaccaggatgcagtgagaacggctcggttttaatattgatattaagtgaagtctgtcctttggtgtcttttttaccgccgcctgatccgccgctgaatccgccgcacgcacttaatacaagcgagaagataagcatcaaacctacaatagaccaacgctttttcatgcactaaccccctaatcaaatttttcagcctttactactaaatactcagaaatatcagacaaaataacttaatatttttctaaactttaattgtgttccgtcttttctgattattttatgtaaagaagctgtaacaatagagtgaacaagttcattataatgaaatgaataatttattgcaatactattttctcaatttaaaatatttaaatttggtcagtttttctgtcaaaaaggtgatacacttctatagtttaaagcatgacctaactaaatttttttattgcaatttccagttcatattgctttttacatataatattcgttatacgaaatgttgatatgcgttatcatttaagcattttcagttctttttgaggattttcagcccttaagcaaactggaaataagcttgtattcctctgatgacatttggctataattgatttataatagatcaatcaaatacatttgttgtgattgcgatgatgaagagtagtacacattttcatccgtttgaagagagtctgcggtgctgggagcaggtaacgggcgatgtggaatggacttctgagcagctgaccgaacgttagtaggcccagccggagcagcctccgttaccaacgtctcgagcgattccattgtaatggaataatcagggtggcaccacggttcattcgtcccttttttctacgggaagaatgggctttttttattatgttttaagaaatgaggtaagaactatgaagaaaacgattttttctggcattcagccgagcggttccgttaccctcggcaactacatcggcgcaatgaagcaatttgttgatttgcagcatgactacaacggctacttctgtattgtcgatcagcatgcgattacggttccgcagaatcggcttgagctgcggaagaacatccgcaacctcgcggctctttacctggccgtcggacttgatcccgagaaagcgaccctctttatccagtcggaggttcccgctcatgcccaggcggggtggatgctccaatgcgtcgcatatatcggcgagcttgagcggatgacgcaatttaaagataagtcaaagggcaaagaagccgtcgtgtcaggactgttaacctatccgccgctgatggccggcgatattttactgtacggaacggatcttgttccggtcggagaagatcaaaaacagcatcttgaactgacccgcaacctggcggaacgcttcaataaaaaatacaatgacatcttcacgattcctgaggtgaaaattcctgaatcaggcgcgcgcatcatgtcactggctgatccgctcaaaaaaatgagcaaatcagatccgaaccaaaaggcatacatcacgctgcttgatgagccgaagcagctcgagaagaaaatcaagagcgccgtgactgattctgaaggcattgtaaagtatgataaagaaaacaaaccgggcgtttctaatcttttgacgatctattctattttaggaaacacatcaattgaagaattagaagctaaatatgaaggcaaagggtacggtgaattcaaaagcgatttagccgaagtcgttatcggcgcattgacaccgatccaagagcgctaccgtgaattaattgagagcgacgagcttgaccgcattctcgacgaaggagcggcgcgcgcaaacaaaacggccggcaaaatggtgaagaaaatggaaaacgccatgggtctcggacggaaaagaagataaagaaaagaggcgggagaatccccgcctcttttttagttcacttttgattcctgctccatttcccaaagcttttcgaaaaacggctgccctttaatcaaattttcacagaacgcaagatgtttatctgaccagccttcaattgtttcattgtaaagcatgtcccagatctcttcaaagctcatccgtttgatctgctcatacatatggggattccattccgtgtaccaatacacaatttccgcacggtttttcagccctttcagctggtcgagcgccataaacatcagctgcttgatctgccgctcttttctcgtcagccctctgacgtgctccggcgccaatgacaaaatgtgatattcctttgaagactccaattgcgccggctcaaattgaaacgattccggttctacatcctttaccatttcataaacaagctgctcctgtctcggaatcaggcggctctttctgaccggaatggtatacccgattgtatccacggcaatgatgccgatcccgtctgtcacgacaaaacaatactccagctttgtccgctcatgattttttcgcacgtatgacttttggtggacttggtcaagcagctctttcggaagctctgataagtcgttttctatgtaatgaaataataccgacggcactctgagcagcggcgtctgatccaaaagttcaaccgtgtcttccttccgccattcgtgaaaatggcatacattgtagccgttttcttccccttcaaaccaattgacccatacatcatgaagaaataacatattcgacccctcactttataaaaactgttgtccacagtataggcaagggatagataaattattccatttcgatatgagatttccgcaatacggaactggatttctgactgcatcgcaacaaaaaaatctcccgttccgtccgggagatcatttcacatttttcggatcaagcgcatcacgcagcccgtctccgacaaagttaaagcacaatacggtaagaaggatcaacaaacctgggaataacgggtaccaccaagcctgaatcataagcgtaaagttctgtgcatcctgaagcatattgccccagcttgcgatcggcggctgaatcccgaaaccgagataacttaatgtagattccgccaaaataaccgttcccacctttaatgtggctgaaacaataatcggtccgagcgcattcggcaatatatgagaaaagatgatgtgatgattttttgtaccgatcgtctttgcagctaatacaaactctctggaacgaagcgataaaaactcccctcggacaaggcgtgccgttgttgtccagcctgtaagggagaaaattaaaattaatttatccattccgggctgaaaaatcgtaacaagtgtaataagcaaaaatatatcaggtatggataatacgatatcaacggttctcatgagaacggcatcgacaatccctttaaaatatccggcaacggctccgacaactgtcccgattgtaatcgcgccgatcacagaagcgaatccgacaagcaaggagacgcgcgccccgtacagaaccctcgtaaagatgtctcttccgaatttatcagttcccattagatgttttaagctcggcggcttcaaacgattgataagagattgactctccggagagtaaggagcgattaccgaagcgaacaaggctgacaagatgatgatggttaatataacggctccgattacagctagtttattttgaaagaacttttcgaaaaaaatcttcgtcattgtttccggtttggattgaatattttcctttaattttacttcgctggggggtgtgccggtatttggctgtaacatttgacctctcacctctctttgttaatattcaatgcggggatcaaccagcgcatataagatgtccgcaattaaattccccaccacaaccaaaacagctgaaatgaccgtcatggccatgataaccggataatcccgcgaaaaggctgaatcaataaacaatttgccgagacccggccaagtaaaaatctgttctaccactaccgctcccccgataaatgacggtatcatcagaccaaaaatagtgatgacaggaagaagtccgtttctcaaaccgtgtttaaaaatcactttattatctcggaatcctttcgcacgcgccgttcgtatataatcctgttttaacacatcaagcatactggatcttgtgtatctcgttatccctgccatgtctgccgtggcgagcacaaaagcaggcagaatcaagtgatgcaatcggtcaaatatgttaaagtcagcattcaaagtgcttactccgccagtgggaaaccaccccagatttacagataaaaccatgattaaaatcaaaccgaaccaaaaattcggaatggcaagccctaaaaatgaagtaacagttatcccgtaatccaattttgaataaggacgtttcgctgacagaacaccaaatggaatagaaataagaagagcgacaagggttgagaaaagcataagcacaatcgtattcggtaagcgggataagataagttcagaaactggagtgcctttcttgacgatagaagtcccgaaatccccttgcagcatattccccagccatttcacatattgaacaggttccggatcattcaacccgtatttttcaatgaattttgccctgtccgcttgactgattgtagggtccatcataagtgacatcgggtctcccggcgctgctttcatgatggcaaacgacaaaattgtaatgcctaagagaatcggcaaggacattaatgttcgccgtaaaatatatgtaaccatgttcttgtcccctttttaaataggataagagaggaaaggaacctccttccctctccagggcttttgctatttttgatccagccaccatttttcaatattgtacaagtcatttttagggtggaatacatagccttgtaaattattcggcattgctctgtggtaattgtaatagaataagaagctgtacggctgatcttcagcaatcaatttgtatatctcttcatatttcttttggtattcttttctgtctgtaattgtcttcgcttcttcaagcagcttgtcgactttcgggtttttataccagatattattcagcccgtttttcgattggcttgaatggaagatagagaactgatccgggaacgttgcaagactccatccgagaagaagagcgtcataatcccaattaggggcacttgtctgttcgattaacgcactgaattcaacaattcgcggtttagcctcgattcccacttcttttaattgctgctgaacgacaacagctaaatcttcacgaattttattgccttgattcgttttaatttcaaatgagaatttttttccgtctttatcaaggtagccgtcaccgtcatggtcttcccatccggcttcttttagcagctgctttgcttttttcggattataatcaaatgtcggcactttagacttcggataattccatgacagcggactctcaggaacatccgctaccttaccgtctccgttcagcacttgatccaccattgcctgcctgtcaagagcgtaagtcaatgcctgacgcacttttttgtctttaaagatctcttttttctcattccagccgatatagctgtagtttaaaccaaggtcagatttgaccttcacatttccaaacgttttaaccgtatcaaaatctgtgcccggcacaacgaagaaatcaatatcccccgcttttaactgagccacagccgcgttagaatcaggtattgtttttactgtcactgtatcaaggtaaggtcttccgccaaagtaatcatcatttgcttccagtttgacatactcgccctttttccactcaacaaacttaaacggaccggagccgattggatttttacggttaaattcattctctcccagatctgcaaccggcaccttacccaatatatgttttggcaaaatgccgtaactgtcgagaacgacattatagaaataggcatcttttttcttcattttaaactgaatttcatattttccttttttcgttacggatttaagggactcaaaacccgagccacgctcaccgttgtaatccttgttaagagggatgctgtaggtgaaaacaacatcatcggccgtcagctcttttccatcatggaattttacgccttttttcagttttacatcatacgttaatcccccgtcagcttctgttactttttcagccagcgacggcttgacgtttaatttctcatcagtttccaataatgtgctgtaaagcattccttcaatatcagaacttgcaacatcagtagaataaagtggattaaaaagtgtgggttccccggttgacccgacaaccaaatctccgcctttttgcggttttcctgccggtttggattcggtgcttgtggattttgagccggagcaggctgacaggaagatggcaaacgccataaaaacacttagcatcatcagtgcgcttttacgtaatttcatatcaattccccctttgtgatatatatgcagcaaactggttatgtaatccggcataccccctctcgatgcttgtcatttcaggcatataaatggcaggcgacgtaatggccgggagcggcttcttcaaatgccgggatttgttccttgcagatcggtttggccatcgggcaccgcgtgtggaacacgcagcctttcggcgggtttgccgggcttggcagttctcctttcaggatgattcgttcccgcttgacggcgtctttttttctcgtgacgggcactgaagacaaaagcgcttgcgtataagggtgaagcggattgccgtacagctcgtgtttatcggtcagctccatcatttttcccagatacatgacgccgactctgtcgctgatatggcggacaacactcaaatcatgagaaataaacaaataggtcaggttgaattcatcctgcagttcttccatcagattgatgacctgggcctgaatggagacatcgagtgcggaaacgggttcatccgcaataatcagctcgggattcaacgtcagagcccgcgcaatcccgatccgctggcgctgccctccggaaaattcgtgcggatagcggtttgcaaagctcggatgaaggccgactttcgccagcagctcctccacccgctcgttccgctcgctcatgctgtacatatggtgagtctggaacggctctttaataatggaacgcagcgttttcctcgggttaagggatgcgaagggatcttggaagaccatctggatgtttttgcggacgctttttctcagcttttcttcagataagccggagatatcctgacccttaaatagaatccggccgtctgtcggcttgtataaacggatcatcgtccttcccgccgttgatttgccgcatcctgattcaccgacgatgccgagcgtctccccgcgcttcagtgaaaaagaaacaccgtcaacagcctttatatcaccgactttcctttgaaaaaaaccggagcggatcgggaaatatttttttacgtctttcagctctaaaatcgtttcttggcctgcagctgtcattttgattgggcaccctcttcctcatataaaaaacatcttacagaacggccgctttcatgcgttatcagctccggctgccctgttttacatttgtccatcgcttttgaacacctcggggcgaatcggcagccttccggaagattatccggtgtcgggacactgcctttgatcgcttttaatgtatcaatctctccatctatcaccggtatggagtttaacagcccttcggtatacggatgaagagggtttaaaaataagtcctccacactcgcgctctctacgacttgtccgcagtacatcacgatcaccctgtcggcggcttcggaaaccacacctaaatcgtgagtgatcagcagaatggaagtatcgaattttttgcagaggtctttcatcagctccaatacttgggcttgtatcgtcacatcaagcgccgtcgtcggctcatcagcgatcagaagcttcggattgcagctgagcgcaatggcgatcatcaccctctgtctcatccctccggaaagacggtgcggatattctttcatcacttgttccgctctggagaatccgacgagttccagaagctcaacggcttttttggacgcttctcttttattcatttttttatggtattcaagcacttcggtaatttgttcgccgatggtcagcaccggattcagggaagtcatgggctcctgaaagatcatagagacgtcatttccgcggattttgcaatattcgttttcggtgaaggaggccaggtccctgccttcaagcttaatcgagccgtccataatttttccgcccgagctttggacaagtcccataatagaaagcgaggtgatgcttttgcccgagccggattctcctacaagagcgacggtttcgcctttgttaatgtgaaaatcaaccccgtcgactgcggggatcggctgtttctttctgaaaaaataggtctttaaattattcacttctaatagtgtgctcatgatacgcccctttctcattccgctgaagcagagggaaacatacgtttcgctatcacaaaatatagaatagtcgaaaaattttatagttgtatattattacatcattattacaaaagcaagaattttttaggataaatgtaatatccttaaataatttccattcttttaatctattaaagcgttgcctccagaaaggtttttgaagggatggccaatgcttcttttactgttttttgatggtcggttaaatatttttttactatattgaatccgacggcatagccgagcattgaggggaagtatccttttccgtataacagctgggaaaacattctgctgtctctcgttaagcggaggttcggcttgactcttttttcaaacagaaaatcaagctgctcaggcgtatagtaggacgtccattccgccgtaagacttgagccgaaccgctcatatacagcatattctgccagcccctccatcatgattgtatcaagaaatgtctcgtctttttcgtcctttgtcacatgttctaaccggcagacgtgattatattcatgtgtcataagagcggatacagctgaattggaactatccgacgatagaaagaggaacattttgtcccgaaaggccagaccggattttgatccgaattcctgacggattttccggtttcgttcatcgacgggcaaaactacgatcggcacgtccggcccgttccacttctcctttaaataagcttcctccttttgaatatggctgtagcatcctttttctttcagccgtttactggtcctaacgccgtccttcaaatggcggaacatgccgtggttttgcagcatcccgagtattggcttccactctttcttatcggcccctgaaaaaagcggcaaaagatgcggggccagatcatttacggatgccgccttttccatccattgatatgtctgcttgacgctcataccggttcgcctcctcttgttgttatcatatgcacgcacaaaaaaaccggccacctttttcaggcagccggtcagaaactgtattattgatattttttaaagatcaaagtggcattatgtccgccgaagccgagcgagttgctgagaacgatgttgacatcctgctcgcgcgctttgtccggtacataatctaaatcacactcttcatcaggtgtttcgatgttaatcgtcggcgggataatgccgtctttaatggccatgacggagaagattgcttcaattcctccggcagcgcctaacaaatgacccgtcattgattttgtcgaactgacggcaagcttgtacgcatgatcaccgaaaacggtcttaatggcttttgtctcatatttatcattgtagtacgtgcttgtgccgtgagcgttgatgtaatcaatttcttcaggcttgatgcccgcatctttaattgcttcctgcatcgctctcgcaccgccttccccgtcttgggcaggcgcggtaatgtggtaggcgtcaccagttgagccgtagccgacaatttccccgtagattttcgcaccgcgggcaagcgcatgctcaagctcttcaagcacgacaatccccgcgccttctcccatgacaaagccgtcacggtttttatcaaacgggcggcttgccgtttttggatcaggatttgtagaaagggctttgtttgcgctgaagcccgcaaatgacattcttgtcagcggcgcttccgttccgcccgtaatcatcgcatcggcatcgccgcgctgaatgactttaaacgcgtcaccgatagagttcgttcccgtcgcacatgccgtcaccgtacaggagttgactccttttgctccgagagcgattgagatttggcctgtcgccatatccggaatcatcatcggaacaaagaacgggctgacccgtctcggccctttagtcaggaagatttcgaattgggattcaagcgtttcaagaccgccgattccggaccctacccaaacgccgactctcggcgcgatctcgtctgtgatgttcagaccggcatcttgaacggccattttcgcggctacgacagcgtattgcgtgaagcggtccatttttcgcgcttcttttttatccatgtgattttcaatattgaaatctttcagttcagcagctactttcgccggatactcgtccgattccacacgtgtgatcggtccgattccggatacgccgccgattgcatttttccagcttgtttcggcgtcgtttccaagcggagacagggctccaagccctgtaacgactactctttttttactcatcttgtgtgcacctcacctttttttatcgtccccagcgtattgctatggcgccccatgtcaatcctccgccgaaaccgaccatgacgatgacgtcgccgtctttaattttgcctgcttccagttcctctactaatgaaatcggaatggatgctgcggatgtgtttccatatttatggactgttttagacatcttttcaaccggaagctccaaacgttcccgtgccgcttccatgatgcggatgtttgcctgatgcggaatcaaaaagtctacgtcctctttggagaggccggctttttcaatgacatttacactcgattcacccatttgccggacggcgaatttgaatacttctcttccatgcatgattgtatgccctttttcatctaagtacaagtgctgaccgcctgtaccgtctgctccgagctcaaatgacagtatgcctctgtcgtcgctgaccggtccgatgaccgccgctccggctccgtctccgaacagcacagccgtattgcggtcgtcccagtcggtaatgcttgagagcttttccacgccgaccacgaggacatgtttgtatgtttgcgattcaatgaattgtttggcggttacgataccgtacataaaacccgcacatgcggcgctgatatccatcgcgcacgcttttttggccccgagcttctcttgtatcatacaggaaacggtagggaaggactggtcaggagtaaccgtcgccacgaggatcatatcaagctcctcagcggaaatgccggcctgatcaagcgctttttgcgcagcctcagcggccatgccggatgaatacatatcttccgcggcgattcttctttcttctatacctgttctcgtacgaatccactcgtccgatgtatctaccatttgttcaagatcatgatttgtcagcactttttccgggatgtaacggccgacgccaagaattccagctttcattggaaagactccttttttataatgaatttaaaactaattagttatgatcaattattagtatcaggtactaattctaccctattttttttctgttggcaatatattcgtctaaactatcggacgctgctcctcatagaataaaaggaagacgaaaggaggcttcactatggatattttctccaaaatgatgttcggcgattccagagaccgggataaagaaccggaagaaaacccggagcagcctcaggctgaaaacgaagaagagatcgattacaaccacgtgatgaatcagctggggtccatcatgaactctctggatcaattaaagcccgtatttaaaaactttgcgccgatggtgtccgctataaagaaaaaaatcatgtgaaaagccacttcatgaaaagtggctctctttatttattcagctccccggcatcagatctgccaagctcatacgcttccgccatgaccgatgtaaacaggtccataaacggctgaatcatttccatagacagatctatgccggatttctcaagctctgcctttgcttccggcaggtatttcatcgcgatctgcataaattcaagagacttttcatgctgcatgtgtatccacctctattcatttgacggcagttcatttgttcggttatacgtttttacaaggtctgagattttgtcttgaaatgctttgtccaccagagggctgaacgtccccatttcaacgactccttccctgaaatcaaagttgtgatctccgctcttgagcgtacctttattatattgctcggcaattaatgtataggctttatctacgttttgcaccgtgcttgtcagcaccgtgtttttgccgagattcgattgctcggcgacatagccgatggcgtaaagcccgtcttttttgatttgctgaatgacaggaacattatacccgtctccggccggatatacaacatccgtgccttccgcttttaacttctcgtaaagatgcagcgcttcattgccgttatcccagtggtccgtaaattcagtattgacggtgatatcaggcttttcatatttcgcccctttgataaagccgtctacttcaggctgccacaaaaaggaggcgatgacgccgacctcattggtttttgacatatgggcggctgtcattcccccgaaaaaacccattgcttctcccataagatgaacgcttgtgacattatcgcttttcgccgttccgtttgcgacgacgaattccatgtcgggataatccttgctgatcatattgaagatttcctcgtattcatttccgtgcccgtataaaagattgactccttttttatgaaaatcatctatcgcttttaaaatatcttcatcggatctgatattttctttataataaacgtcaacgttaaattcagattgtatcgctaataaacctttgtaaccttttgtgccccataccaagtcactgatggtatcgggaaaaagcattccgaccttctcaatttttcctttaaacggagtttgtgcgcatccgctcaataaaaggaggacagaaaagatcatgacaagcctggtgatcaagccatgttcaaccccttttcaaactcataacatatataattgatatacgtttattgtagcggtaatgcacataacatggaaggtatttcttaaaaaatgtcgaatattgatgaaaattgtcttttccattctttaattttttcttccgcttcctttttttgcgttttttcttttatttccagggtaataatctgattttcgtcttctgtgccgtatgcctcaagctgattcatcagcccgcagactgcgtcttctaaaaagatcctgctttcgccatcttcttttgcttctgtccacggaccgtaaaggggaggaaggataatcgcttttgccgtatcccgctgaccgtttttttcccagtctccgtgatcctcactgtaaacaatccaatataaaggctcagccctttcttcaggcagacacccgctcccgtattgaacgcagatacgatcgtattccttttcaccgatttcatctattatttgaaaaagcccgtttctcgcgagccacattaatcgttcttctaaatacagctgcctcgttttgtcctccggttctgccaaaatgacatcaacatgcacgccctcatccatcaaccgttcgcacaatgaaaggccgagaaattcgtctgctccaatgatcagcgctgtcttcatcacatctgccgcctttccggtttttcattcgcacacaagccaaacagccctctgaaaagagatggctgttgtattctattcattacaggtctttttcatgactgcggaaaaaccggcagatggctctgtacatacgcgcagggttctcaagcaggtgatacgtgatatcagtcttgcttccggtcttttcccgggcttctttatacgcattcgcatgcagggtgtacgggtacggcgctccggtcgttctttgccatatatgtaccggcacgcgggtgcggcagccggtaatggtctgatagctcagtgagcttgcctctttttcagaaacaccgaagctctgtgccgtttccctcagaaactgcttataaaaaaacttattttctttctctgattcaaaatgggcttgaaggtcaagacaaggatctaacattgcggctgaacggatatgctccgctgaagactgcagcaattgatcggcgataagggcgcccatgccttctgcgagcaagtgtattttcggattgagggtttcttgtttaagcacataatgcatcagctgtctggcgtaaaggacggctttttccgaaccccaatgccgtccgtataaattgctgttaaaaatggtgtaccctctgtcaagcatcgtatttaacagctggtttctcccttcatgttcgagccaaaagcttgagtcccggctgacaaagtgggttttgtcccccagaataaagatacagaagccgttcggccgatacggcagatggatgacgttcagctcagatccgaattggaaaaatctttccgtaatccccatgcctgcccgcctccttttactcctaatctctctattggctatcatatgtaagaagaatgaaaacggatcggataaactcctatttgctgctatgttttggctattatcccgagcacaggaaccgaattttccatcagacggccggacaggcgggcaatgtcagtttcaggcgcgctttttgatgagaaaatgaccttccgcccgcgctttatgtatggtatgatacaacgtagaataaaatgaaggacgaggtggaaacgtgcggtttattatcggttttatttggacgttccttttaacacatatggcctgttatttggtcgcctccatgaacagcgcggcgtacaatttcaagcaatcatccgttattgccgtggttattgcggtgctagtctttgttcttgcggagatcatgcctgtcaaacaggatgcaagccagcattaaataaaaaaacctgctattcagcaggtttttttgtgttcacggttttcgttgatacgtccacaatctgttgtggtttgaagtttcagggaacatttctcccactgtaagcttgattttttgcgggtttttgaccatgcttcccgtttcgccgatttcaacgtacacaccgttattcggcgctttttgtcccgggcggaattgatgctgctgtcccacgtcatttcctcctttttcttttttatgtagtatgcgcttgtatgcggagaaatatcaaaaaccgctgaatgagattcagcggtttttttgttcatcctgtttgtaaagaagagctttcaggagcgctttttgcgcgtgaagccggttttccgcctgctgaaataccgcagagttcgggccgtcgataatctcggacgtgacctcttcttcccgatgcgcgggcaggcaatgcaaaaatgtatagtcgggtttggcgagactgacgagtgaggcgttgacttgatacggggcaaacacattcagccgctgctgcgtctcttcctcctgccccatgctcgtgaagacgtcggagtaaatcacgtctgcatcccgcaccgcttcctgcggattttcggtaagggtgattttcgctccggaaacagccgccgcttcttttgcggcatttaccgcctcttcctctacttcatagcctttcggcgaagcaatcgcaatgtcacagcccatttttgcgcagccgatcattagtgaatgcgctacattatttccgtcaccgatataggcggcttttactcctttcagttttcctcttatttcttgtatcgttaacagatccgcgagtgcctgacacgggtgataccggtcggtcagcccgtttatgacgggaatgtctgcatgctcggcaagctcttcgactttttcatgctcaaaggtgcggatcataatggcatcaacgaagccggacagcaccttcgccgtatccgcgaccgtctccccccgcccaagctgcaggtcgctgcttgaaagaaatagtcccgttcccccgagctgggccattcccgcttcaaaagacacacgtgtgcgggttgaagatttttcaaaaatcatcgccaatgttttcccttggaaaatcggctgtatcggatgttgttttaataatgaagcttctgtcagaagcgcattgatgtctgacgggctgacatcttttaaggaaagaaaatctttgccgtacaaatgggttaatgtgtgttccgcttttattgtgtgcatgatgccacttccttttgataaagatctttgagcgatacaggctgaggtttgccggagccgcttgctaaaaatgcctttacggtttccggttcagtaaagaccgtcacaccgtgcgtcatggcttcaatccgttgtttacgcgcttcttcagagtgattgaaattgatatggaccgctttatcctttcgctctgcccatgccgggaacgcatctttgcataccgtaaatcccgcctcttgagcctgacgttccaattccgcatcacagccttccagatagatgctgccttttttctcccagacgtgcgcgtagatttttttcagggcgctttctgcgtcaaacgcgacacacatgccttctccggtcgacttcatttccggcccgggctttacgtccacatcctgaatggcgtgcgaagaaaaaaccgggaatttcactgccgttccgtgctgattttgaacctcgggcttgatgtctttaagggaagcgccggccagcaatctggcggcaagcgggatcatcggcacccccatcaccttagacacgacaggaaccgtgcggcttgcccgcggattcacttcaagaacgagaatatcccctttgtcatcaatgacaaactgaatgttcatgatgcctttaaaagccagttttaccgcgattttttcggcggcctcttttatattccgctgcatatcaggtgtgacagacggacccggaagaatcgcaaaactgtcacccgaatggacgccggcgcgttcaatgtgctctgtgtaagtcggcacaaatacttcatgtccgtcggaaatcagatcgatctccaattcttttcctgtaatgtactgatcgatcaaaatcggatacggcatgctcgcttcatttgccagcagctctgacatttgcgcttctgaatcaacgatgatcatgcccatcccaccgatgacataagacggacggatcagcacggggtagcgaattcggcttgctttttccgttgcttcttcttttgaataagcggtttcgcctttggcatgtttcaggtcaaggtcatcaagcagctgataaaacagatcccgatcctccagcgcatcaagggtttcaaaggatgttccgagcagcggaatgcccgctttttccagcggttcagcggcattgatcgcggtctgtcccccaaattggacgatggcaaaatcaatgttttcatgttccgccacgttcaaaatatgttctgtcgtcagcggttcaaaataaagccggtcggcgatttcataatccgtgcttactgtttccggattgttattgatcataatcgtttcataccccagcttttgcagggtcagaacgccgtggacggcgctgtaatcaaattccactccctgaccgatgcggatcgggcctgagccgatgatgagggcgcgttttttctcttttcggctgatatctccgtcgctttccccgaggtaggtggagtagaaataattcgtcttggcatcaaattcagcggcacatgtatctacgattttaaacgacgggacgatgcctgatttctttctgagagcacggatgtcttcttccgtttttcccgtgagagatgcgatcatgacatccgtgaagccctttaccttcgcctgctttaaaagcgggaaagacagatgatccccttcttccatcagcttgttttccaatgtgatgatatttcggaatacatggagaaaaaacgggtcaattttcgttttggcatggatgtcttctatcgtttcaccgcggcttaacagctccatgacgacgaaaaatctccggtcatccggcgttaccgctaattcccacagctgattgatcgtacagccgccgagttcaggcaggcgggtgccgatcgttttcagctcaagggaggccgccgctttttgaatggccgcttccatatttctttcaatcgccatgacctctcccgtcgctttcatcttcgttccgagcgtgcggtcggcatgtttaaatttatcaaacggccagcgcgggaatttgacgatgacataatcaagcgccggttcaaagcttgcataagtagagcccgtcagcggatttttcagttcatcaagcgtatagccgacggcaagttttgccgccattttggcaatcggatagccggtcgcttttgacgcgagagctgaagagcggctgacacgcgggttcacttcaatgacatagtactgtttgctgaacggatccagcgcaaattgaatgttgcagcctccgaccacatccagcgccgaaataatcgccaggcttgctgaacgcagcatctgatattcttcatccgttaacgtctgggacggtgcgacgacgatggagtcccctgtatgcacgccgacgggatcgatgttttccatattgcagacggtgatgcatgtatgattgctgtcgcgcatgacctcatattcgatttctttaaatccggcgatgcttttttcgacgaggcattggctgatcgggcttgctaacagcgcctgtttaataagcgtctgaaacgcttctttcgttttcgcgattccgcctccctttccgcctaacgtgtacgccggtctcagaatgaccggaaatccgatagactcagcgaaacggagggcgtcttcttcgttgtcgacgatttcgctttccggaacgggctgatcaagctctttcatcagggcgcggaactgctcccggtcttcgcctttttgaatggtttccaccgatgttcccaaaagcttgacgtgatgcttcttcagcacgcctgcttcttcaagcttaacggctaaattcaatgccgtctggccgcccaaattggcaagcagaccgtccggtttttctttttcaataatggcctcgatgctgtcggttgtgagcggttcaaaatatatttcatcggcaaacgcctcatccgtcataatcgttgccgggttgttgttgactagaataacgcggtatccttcttctttcagagccatgcagccctgcgttcctgaataatcaaattctgccgcctggccgatgatgatggggccggagccgatgactaatatgctggaaatggttgtatctttaggcatgagcgatttctctccttgctggtatcactttctctagaaattcatcaaatatccactcgctctcagccggtccgggatgagcttcagggtggaactggacgcttaatacgggaaggcgcttatgaatgagcccttccactgatgtatcattgacatgatgaaatctgatggacagctcgttttcgtcaattgatgcttcatcaacgacatagctgtggttctggcttgtcataaacacccgtttcgttttccggtctatgacgggatggttggcacccctgtggccgaacggcagcttatacgtatttcctccgaaagccagggcaatcagctgatgcccgaggcaaatgccgagtgcggggaaatcactgagtaatgatgtaatccggttcatgtacggcgcaatcgctttcgggtcgcccgggccgtttgagagcacgattccgtcgggctgaatgtcgtaaacagcgttcatctgctgatacggaatgaccgttactttacagccgcgctttacaagtgacgaggcgattgattttttataaccgaaatcaatcagcgcaatatgccggtctccattccccattgacgtgatgtcttcagactgcgccagctccgccgggttttctgttccggatgctgccggaatttctcctgttgttgacacggcagcgttcatcgtgccgccggagcggatggttttgacgacggcccgtgtgtccacttcggttaagagcgggatgttccatttatttaaatactctctcaagcttgagactgcttcatggtgagaaaaatgttcacacgcttcatagacggcaacagccttgacttgaggaatcttactttcaaggtctttttcattaattccgtagtttccgatcagcggatacgtaaagacgatgatctgacccttatatgacgggtctgtaagcacttcctgatagcccgtcattccggtgaaaaaaaccgcttcgccaacacagcgggcttctttttcaagttcaccgccaaatgatgttccgtcttccaatactaaatagcctttcatctaaagcccacctcttgatgaataattaattaaaaatatgaatttttatacttttatatcgaaaaaaattaccgtttcactgccgaatgcgcttcgatcgctgccttcagcatactgacggccgacagcatttcttcttcagaaaccgtaagcggcgggagcagcctgatgacattcggtccggccggaagcacgagaagcccgcgttcctgcagatctccgatgatgccggacacgggacctgcgcattcaatgccgattaataacccttttccgcggatttcttttacaaaaggccctgtcagttcacggttcagctgcgcttttaaaaatgatcctttgtctgccgccgcctggagaaagtccggctgaaacacaatatccaaggttgctttcacagctgccatggcaagcttattgccgccgaaagtcgtaccatgcgtacccggcgtaaaggcgtcgccaagcttctttttgccgatcacggctccgacgggaaaaccgtttccaagccctttcgcagcagtgatgatgtccggagagatgccgaaatgctcatagccgaatgccttgcccgtccggccgattccggtttgaatctcgtctgcgataagcagcgcctgtttgtctttgcaaaatgtctgtaaggcttcgatgaattccggatcggcgggattgactcccccttctccctgcaccgtctcaagcatgacggcggcgatatcatcctcttttgaaagcgtgctgaatgccgacggatcattgaacggaagatagtgaaagccttgaagcatcggtccgaaaccggtcttgattttgtcttgtccggtggcggccatccccgcataggtccgcccgtgaaaggattgatgaaatgttacaatttttgtctttcccgttgctttacgggcaagcttaatggcgccttcattcgcttcggccccgctgttgcagaagaaaacgagatctcccgcgctatgttcggcaagctttgccgcggctttttcctgaagatcattttcaaacagattggaaacgtgccatacgctgtcaagctgttctttcactgcttctgtgacctcatcatgacaatggccgagattggaaacggcgatgccctgaataaaatcgagatacgtttttccgttttcatcctctgcaattgtccctttcgcttttttgatatcgatgggccagcggctgtaggtttgaaatagactgctcatgacacgctctccttttctttgacgatttttgttccttggaaggcttgatcggtgaaaaacgctccttttccgtttacgatcatcacttcctcgacatcttcactcagtgccgataatgccgagtttaccttcggaatcatccctcctgaaatcacgccgtcatctatgagggcctgaatctcttgcggcgtcaaagtatccagcctgctctctccgtccataattccttcgacatccgtgacaaataaaagtttgtcggcgtgtaaggctgaagcgacggccgatgccgcggcgtctgcgttgacgttcagcgtttcgaaatcacttgtcatggaaagcggagcgataacgggaatgatgccttctttcattaatgcgtgaatgattgacggatcggttttttgtatttcgccgacttctccgtatttgtcttgattaagataggatgcttgaaggagaccgccgtcctttcctgatattcccgcggctttcagcccgtttttcgcgagttcggttacgaaaaatttattgatcgtccctgacaagaccatttccgctgtttccagcaccggtttggtcgttttccgctgtccatcgacaaattccgtttcaatctgcaatgttttcagcatttttgaaatgtccgggccgcctccatggacgacggcaatgttccagcccgattgcataagctcttttacattttgaaaaaaatcggcggataactctcggattacgcttccgccgcacttaaaaacgatcgttttcttcatgccgctcccctttgttatgtgcgatagctcgcattgattttaatataatcataggttaagtcacagccccatgcccggccgctgccggagccttcctgcaggcggactgcaatcgtaatctcatcacctgataagtactccttggcatcagtttccgaaaacggctgaggttcgttgtgtttaaacagacactggccgccgaggaaaacttccacttgttcggccgttacgcttgccgcactgtgcccgattgcgccgatgatgcgcccccaattggcgtctgtgccgtaaacggcggtcttcacaaggcttgagccgacgatttttttggcgataatattcgcctcaaggttgtttttcgcgccttcgactctggcttcaattaatttcgtcgctccttcaccgtctctggctatatctttggcaaggtcttcgcatacaagctttaatccctttttaaaagccggccagtcagggtgctgctccgtcaggcaatcattccccgcgcagccgtttgccatcacaagcaccatgtcattcgtcgatgtttctccgtcaacggtgatttggttaaatgaaacatccgtaatctctctaagcgcgtttttgagcgcctgttcttccacggccgcgtccgttgtgacaaagccgagcattgtcgccatgttggggtggatcatgccggagcctttcgccgctccgccgatcgtgatgatgtctccgccgatcaccagttcataacacgtctgtttcgtcactgtatccgtcgtcaaaatggcttcttcaaatgctccggatacggacggcgcttgaccgagctgttcaatgcccgcttgaatttttttcatgtctaaaagctcgccgatcaccccggttgacgaaaccgcaacaagctccggctcaatgccgagctggctcgcgaagccgtcccgcatttcataggcgtcctttaatccttggtctcccgtacaggcgttggcaatcgcgctgttgacgataaccgcctgaagcacaccctcttttttcaggctggcttgcgtcactttcagcggcgctgcctgaaaatggctctgcgtatataccgctgcactgactgcaggcgcttcgctgataatcgctccgagatctttttttgaatagcgcagaccgcagtgcacgccctttgcctcaaatcctttcggcgaggatacgccgccttttattttcgtgatttcctcactcagctgaatcatatttttgaatccctctttcgttctatggatagactggcgtcatcgtaagtcccgtttcttcctgccagccattcatgatatttaaattttgaaccgcctgccctgcggcgcctttcatcagattatctatgacagaaacgatggtggcacggtttgttctttcatccacagtgacactgatatcacaaaaattgctgccgtatacctctttcgtcgccggaaattcaccttccggcctgattctgacaaaatatgaatctttgtagaattcggaatacaattctcttacctgtgcagcagacatacccggaggagcctccgtatacatcgtcgccataatgccccttgtcatcggcgccaaatgagcggaaaacgtgatcgggcctgtgccgggctgccaagccgctaattgctgttcaatttccggagtatgctgatgctcattaaccttataaattttgaaattatcattcagctcagaataatgagtgcccatggatgcttttcggccggcgccggatacgcccgttttcgcatcaacaatcagaaatgaatcttgtaaaagcttattcttcgccagcggggcgagcccgagcagcacagccgtcggaaaacatcccggattggcaatcagctttgcagtctgaatctcttctttttgcagttcagctaaaccgtaaaccgcgctttgaatcgttcctttcggagcggccttccgcttataccacttttcatacacggccgggttttgaatgcgcagatcgccggatagatcaatgaccgggatgcccgcctccgccagcttgggcgaccactctccggaaacgccgggcggcgcggctatgaacatgacatcaatttcgtttcggatcgtttctatatgaagcggccgaagtgattgtgacgctatattcctcaaatgcggatatgaagcggcatattcttttccttcgtcgctcgatgaatataatatacaatcttctgcataagggtgatggttaagaatcctgacaagttcggcgcctccataaccagtcgcgcctataatacctattttcaacgggttcaccttcttggtttttgtgaaattatttaacattataacatgaataaaaattaattcaattgtatatttaatattttttcattcattttccatctgttttcgctgacaaaaaaccccctctcgatcgaggggggcataagaaaaacaggctgatcggatcagcctgtttttttcagcatcatcagcccgcttataaaaaacagcacggagctggcgtaaaagataatataaaccgtaaagaaatcagcgagaaacccgccgagaataatggcggcagctgaaaatacggccgtccagaaatgatagctgccgactttttttccccgctccccgccgtcggtgtaatcggcgatcatgattttctcgccgtgtttttgcatcgcgccgaacaggcccaaaagcacctgcacaacataaacctggtgcacgccggtaatgtgcgggagcgtcagaagaagcaccgccatcccccacgaatttgccataaggaaccagcgggaatccagtcttgccgacagccggccgagcagcggatgaatcaatgcgccgctcaagccgaacaagccgtatgagagaccgaattgcgtgtagctggaaccgatgtttttaataaataaaatataaaacggaaagatcaggctgccggcaaaaaagacactgctctgagacaggatcagccattttaaatggttgtgtttcatgatttgtacctctgataaaaataattcataaacaagtcatccggatcatatttgtgttttttctgaaagaacatatcgcttttcggatatgcctcgcgcatctgctctttcgtttgatacagcatatacgggagataataactgccgcggtggcgcaatgccgtatccgtcatttttctgacaatccgcgccgcactcgcctggctgtctgttgaaaacccttcattgattaaaagaacgagtgaaaacatgtcttcctttgcgtatgacagatcggctttttcatttttttgcacatagcggatcgtaatatttacgagattgagatcttcatgtgacagcgtcttgcgtaaatcatgaatgtacggcgcaaattcgccgactggcacgaagtattcttgcagcacatcggtgttgtctgtgttttcatattccaaaaatttcgattctgaccgcatgacattgttcctggagactttcacgccgttttggctgagaaaataagactgctgggttgaccagaaccaatttctgccccagtcataccggcgggagaggccgagcgcgaatttcgtcagcgccggatgctcatcttctttcagttcattgtgccgctttaattctttctggttgtctgagagtgtgtaatcagtcacatacatatcgtgcaaaaagcctttatcccctgttgcgatccgcgcgagatgcatgcgcacggcggggttgcgccgaacatgctgcgtaaaatattgactgtatgtatcagcgttcatgcgtttcgttttcatttcataaagctcatcatccgtcagctcaatatccgcgtcaaggatgacgccgaacaggccgtagccgccgatgacggctgaaaacaggtcatctttcggagtaacggtgatgactttgccgtccgcctttaaaagatgaaacgatttgaccgtatcaatcagcgaaccgtaccggatatcccggccgtgggcgttggcgctcagtgagccgccgatcgtaaaaatgttttgcgattgcatgacttttaccgcgagcccgtatggattgacatagcgctgaatatcattccacgtcgctcccgtctgcaccctgatgatttttttctttcggtcgagaccgagtattttgttgtagcccgtcatgtcgagaacgataccgtcttcataatacgtctggccgcccattgagtgctgggcgcctgcgattgagatcttcagatgctttctctttgcttccttaatggtttcgaccaatgtttctttctcttttcctttgaccgtctgcttaattttcacgggcatgagacggctgacatccgtcattgtccctgcctgctgcaccggctctttgtgaaaagcggaaacagcgaacagcgccgtataaacaagaatgctaaggataatgagaagtagttttttcttcatggattcctccctcgcatgcagccggtctattatatcatgcctcacgtccgtttttttcctttttaacccgataccgcaaaaaaccccgaatggtgggaaactcgggtttttttagtgacttgcccttctttccgcacgccggtctgcagcggcaaagcagacagaacggcgcccgacagaatcatgtttagtacagctcgaaacggtcagccggaaaacaccgggcataaaaatccacagaaatccttaaaatgattttttagtcagtatataatcgatatatatgcagatgtattaccagagggattgtttcaaacaaacatgttaaatgaggtggagaaaataaacataaaaggaatcaatcatcttcttttttctgtttcaaatttggaaaaatctatagaattttatgaaaaagtatttcatgcacagctcctggttaaaggacaaaagacagcatattttgatctgaacgggctttggcttgcacttaacttagaggcggatataccaagaaatgaaatacataaatcttatacgcatatggcctttacaattgacccaaaagattttgatgcaatacatcaaaggttaaaaaatctaaatgtaaatatattaaatgggcgtcctagggataagcaagatcaaaagtcaatttattttactgatcccgatggacataaatttgaattccacacaggtacactccaagacagactgtcctattacaaaaaagataaacctcatatgaaattttatatttaaaggtttgtttgcgatccaaaacaaaccctcactgtcgcttatccgcgttgattttttccttgtaaatgcagacaaaagaaaagcacctccaaactttaggatgtacctaaaatccgaggtgcattttcttattactgaatccctaatgcgatttttgcgtagcgtgacattttgtctcttgtccaaggcggattccagacgatgtggacctccgtctcttttacatccggaatgtcggcgagcgcttttttcacctcgtcgacgatgatcggagcgagcgggcaccccattgatgtcagtgtcatcgtaacgtgcgtgaggccgtcgtcatccatatcaacgtcgtatacaaggccgagattgacgatatcgacgccgagctcagggtcaacaacctgctccaaggcgcccatgatgttttcttttaatgcttcttccacgttccatcactcctttttcctcagtataacgtaaaagcggcttttgttaacacctttgtgctttataaatgcttatcgaaccaggcgacggtttctaaaacggcgtatctcgggactttatgatcagcccgttcgtctttcagaaactgaagatggtcgggccggctgctgtaatgaggtttaatcgtttcataaaagccgcgggtcggtgcatacggaacgactttgtcttgaacgccgtgccagaacagcagcgggcggctgcggagtttttccggttccagactgagatcgaacggtttgagccgcgcaaacagttcatcgacctgttcttttgtgacgtcaatgtcgatgtcctgcttttgaatgtggtcaatctgctgctgaaaaaacgccgtatagttcgggcttcccatcagactgacgccggctttgacccaatcatacgcggccatcgcgccgaatgtcgtaattccgcccattgacgtgcccgcaagaccgatccgcccgtcttcaatcagaccgcgcgcttcaaaatcctttttcagcacgtcaagctcctcaatttcatttaatacaatgtcccaaaaatggacggcgagctcttctgctgacagctgttcagcgcgttcaccgtggtaaagagcttccggcagcaccgccctgaagcccttttcagcaagcaggtaagcgaaatgaagattatgctccttcgcgcttgtaaaaccgtggataaagaaaacaaggggagcgggacggtcccgattttcttcttttacaatatgtaaaaacggaatgcctgatacggtttgatgatcaataagaatcacgttgactccctccttaggataaccataatcataagtgtaacatgtagacaataaagatggtaaaaagctacactgtacataagtgaaaaacagcaaattatatgacaaaaggagttatttatggagacaaaaccttatctcatcgccttagatctggatggaactttattaaaagacgataaaaccatttcccctgaaacggcacggacaattcagaagctgaaagaagcgggccatcatgtctgcatctcaaccgggcgccctttccgttccagttcgatgtattatgacgagcttgggctgacaacgccgattgtcaattttaacggggcatttgtccaccacccgaaagacgaatcatggggacgctaccacacgtctttatcggtcgatgtggtcagacagcttgccgaacttacagagacctatcaaatacataatgtgctcgctgaggtcattgacgatgtgtacttccattatcatgatgagcatttaattgaggcgtttcatatgaatacggcgaatgtcacattcggcgatctgcgtgaaacggtcaaggaggatgtaacgtccgtattgattcatgcaaaggaagaggacgtcgcggatatacgcgcacatttatccgatgtgcacgccgaggtcattgaccacagaagatgggcggctccgtggcatgtgattgaaatcattaaacacgggatgaataaagcggtcggcctgaagaaaatcagcgactattaccaagtgccgagagaacggatcatcgcgttcggcgacgaagacaacgatcttgaaatgctccggtttgccgggtgcggcgtagcgatgggaaacggcacggatgaagtcaaacaggccgccgaccgcgtcacgggatcaaatgaagcggacggaatcgccgaatttttaaaatcctatttctccctgtgaggttttgccgctcataacacaaagccttccgcccatactaaaacagacgactcatctcgtctaaatatggaagggggacattgcaatgggtaaacgaaacaaatcaaaacggtttattcagcaaggcaaggactctgtcagtcttcatgacgcaagatttccatatcggtctacattagaggaagcacagcatgatgcagcaaaagattcggctgaaaggcaggttgacttttaatgagaaacgaactgttttctcaagccaagtcatttgtccagcaggccgtcatgattgctaacggtttcgaggacggcgatcaggaaaaagctgtctcacgcgccaaaaacgccgtgtcttccgcgtacgccaattcgacggatgcagaacgtcagcagctgcaccaatttcaggatcagctggagaaattgcaataaaaaaaagcgccccgtttagagggactgccccccgtttttgagacaggggtcaaaacaccttttaaacagccaattgccgatagtttatcggtgattggttgtttagtttggtttgaatacgaatattgttataataatgaatgtattctatgacagtgcgttctacgatggcagtcgtagttcgatcaatgctgttaagatagaacgtttcagactttagcgaggaatgaaacgattcgatggaggcattatcagcgggcgtccctttgcgggacatgctcatggtaatgccttttgttttaacagctttttgatactcgtaagatgtatacacagaaccttggtcactatgtaacacgcagttctcaggcagcattggtagctgatcaagtgtgtctaagacaaaggctgtgtcctgcttatccccaatagtaaaagcaatcacttctccattgtataaatctaatatactggaaaggtacaattgtttctgtccataaggcaaatatgtgatgtccgttactagtttttcaagaggacgatcagactgaaagttccgatccaatatattatcgaccacggcatatggctgcccatccttcttgcgctttttcaccttaacccgacactgccattgatttttctgcataatacgttgaaccgttttatggttaatacacattctcttttttagtatggctgtgatttttcgatatccatatcgatacttgtgctctcggcacaacgtgccgatttgtttttccaaatggcgcttgggatgatccttcatcagattcttcttccaacgataataagacgctcgagagatacctaaatgaatacagatatcctgtacggtcattgtgctgtgcaatatttctacaagttcgactgacgtttcgctatcaacttcctttccaattcgttgtacttttttaaaacttcattctgttgtctcaggtaacgaatctctgcctgcagtttctctaaatcggaagaatactccggaccttttccgtaagtgtattgctttccaacaggctgttcgaatcgatgtgtatcaccagccttataccatctaacccatgtctgaacctgtgtcttattcttaatattcaactcctgcaggatctctttcataggtacgcctgccaatctcatttctacagccttctgtttcacttcaaccggataactcactcttgtccccatagaaaaaacacctccaagtctaatttcggataacaatcatccgtattcaaactcgaaggtgtttttatttgtctcatcttatggggtcagtccctagacgagggcgccgcttttttatttcacttcaaatgtttttaccgttttcagtctttttccgatctgatcggacttccctaaaaacgtcaccgtcaccgtgtatgttcccggaccgggcacgttcttccacacatctgaaaagtcatacgtttcattcggcattaaggtcacagtctgaaacgcctgagtaaacattttgtcttttgaatagcggtacagttctttgtgatgttggtcatgtacggtcaattcgaatttctgccctgagctgaatgtgaaatcgatcgggctgccgctcttgttttttaaagacatttgaaattcgatctgctgatccgtctgcacagggtttacggctaattccgcttgctgttcattcatctctccggatacctcctcagcgggctccttctgcccggattgactgctgcatccgatcaataaaatgaccggtaataacaggccaaacagccacttcattctatccgctcctatcagtcttttctgaagaaaccaaagatccccgtcgtttgcacgatgtttgtgaaggctttcgggtcgacttctttcacgattttctcaaggtcatacaattcgtaccgcgtgatgacgatgatcatcatttctttctgttcgtttgtgtaagcgccttttgccggcaccgtcgtaatgccgcggaccatttccccgtaaatcgcttctttgatttcatcggctttttttgtaacgatcatggcggtcagtttcatgtggcgggtgtgaatggcgtcaatcacccttgttgtgacatacagagcgacaagggtatataatgctttctcccatccttgcaataatcctgccgtcaaaatgataatcccgttcaaaatgaagaaatatgtgccgaccggcttatccttccatttggccagcaccatcgacacgatatcaagaccgcctgtcgaagcgccgaatttcagcgttaaaccgatgccgatcgctgagatgactcctccgaatacggtattcagaagaatatcgtgcgacagtctcatttccgggagaattcccataaagacggacgtcagcgctacgcttaatatgctgtatacagtgaatgatctgccgactttcagccaccctaacacaccgatgggaatgtttaagaggaacatgagaactcctgtcgaaatataaaagggggcgtattgatcaacgacgcttgacagcagctgggcgacaccggtaaaaccgctggcatatacattcgccggtatcaggaataaattcagtcccgccgcatacagaaacgcgccgatgacgacgattgctaatttttttgcttgttctagtaccatggcttgctcctccgctcattttcattattagcttttcccttaaaataaagttttgaacactattttgccacatttatatgatatagttggcatcactctcaccaatcggaaagaagggaattatgatgacagttcaccttattgctgacagcgcctctgacctgccgaaatcttatattgaagaaaaccggatcgggttcattccgctgcacgtaacacttgacggaaacgaatatgaggacacggtcaccattcaggcggatcatatatttcaagcgatgcgggacgggaaagttccgaaaacatcccaggcatcaccggatacgataaaaaaagtatttttacaatacgcggaactgggagaaccggcgatatacatcgccttttcctcaggtctttccggcacctatcagacggcggtgatgatcgccaatgaagtaaaagaggaatttcccgattttgatttacggattgtagattccaaatgcgcttcattgggctgcggccttgcggtgatgcacgcgcaaacactctgtgttaacgggaatacaatacaagaaatcgaaacgtctgtaaagagcttttgcgcacggatgaaacatatatttacggtcgatgatgtcgcttatctcgcgcggggcggcagaatttcaaaaacgtccgcttttgtcggggggcttttgaacattaaaccgattctgcatgtggatgacggcaggctcgtgccgctcgaaaaattacgcggacaaaagaaactgtttaaacggattatagaaatgatgaaggaagaaggcggcgattgggcggatcaaaccgtggggatcagctatgcagataacgaggagacggcgcttcggatgaaggaaatgattgaagaagcgttccatccgaaagagaccattcttcattcaatcggctctgcgatcggcgcgcactccgggccgggcacgctcgcgatttttttcctgaagccataatttcaatgcgggcgggcatcctaacggacagaagggaggctttgccgcatgaaagatgatgacaaaaaaccgttggacaataacgccgtaaatcagaaaaagaaccggcttgccgaaaaaaaccggcaggcgggaaaaaaccagaattccaaaaaaccggaccatctgtaaaagcaaaacagccctcttgtgtatgaagagagagggctgttttttgttctatatgcgtctaacatcacttatcacgaatccgctttcaggcaatgccggcattctggacaggctgaagctcaaatcttgggacggaacatcgtactctatttcattggcaagaaacgcaagggaagttttcatgacttccacggtcattccctcacccggacagcggtggccgttagccggatcacctccgccctggggaatgaaatcaaatttattttcctcccgcccctgaaaacgttccgggcgaaattcattgggattttcccaaagccgggaatcatggtttgtcccatataggtcaagcatgacggatgcaccctttttaaactcacagttcttccatacgaaatcttttttcacaacggctcctaaaaacggggcaaacgggtaataccgccgaacttcatgtgcaaatctttcggcctcctgatcatctctcgatctcagtttgccccgatattcagggtaatcatgcaatgcaagagctgaaaacgtaatgaagtaagaaatggcggcaatcgggcgcagaacattaataagctcaacagcagccatgtgagaatcaagtctgttcccgtcaagttctgtatgaaaagccatttcatacaaggctgagcactccggcgtttgcagcttgccggaccgcacatcctcaatgacctcctctatccatttctccgttttcagcctcgcccttctgcctttccaatgacgcggtccgacagcgccgaatgcgtctaccatatcggtgaaatcctccgcccgctctttcacttctgagtctttcagcgggacgccggcccactcacaggcagcccggcacagcactttcttcgcttcatcaaaaaggacaattcggtttgaaccctcccacatttccgcagatgctttccactgttttgccaccgcttccgcaagccgtttttgccggggcggtgtcaacagcgacataaatagaagcttcctgtgcttatgccgttcaccgtccattgactggattgcccctgttccgaataacgttttctgcacccgtttggggagggcatgctcccgctgaaatcgttctgtgtcataaaaaagctttgcggcttccgctccgctcatacaaatgaatgtcttccctaataaacgggcgcgaaacacatccgagcgataattctccgctcggtttttcacaaatacataaccatcgcgtaataaagccagactattatcaagacccttttcatgcggaatttgttcatccatcccgattcctcccttcttttttcacctttctcgaaaaagaataaataacacaagtatattcagtatttgtgtttcattcagaagttactcatgtcaggctgcaaaaatcagggggcggggcaaaagcccgttacaaagtaaaccggcggacctgatcgtttaaccgctctgtcaggctcaccagattattgacgctttccgccattttatgaaaagaagacagctgctcaagcgcggaggcagaaatctcttcgcttcccgcagccgtttcctgaacgacggcgctgatgctttcggcatgatgcagcacttgctcaccaagctgtttcgattcgacgatccgtccgtccaattgagtaagctccgctttaatatgggcggctttttgttcaatatggacgaatgattctgacgttttctccatcagctcctgctgtctgtccgctaaagcgacgccggtcgtgacagctccggtaatagatgtgatgccgtcttcaatttgctttaccatatcgaaaatctgcgcggtcgctttggctgatccgtctgcgagcttccgtatctcctcggcaacgacggcaaatccttttccggcctcgcctgctctggccgcctcgattgcggcgtttaatgacagcagattggtctggcccgcaatgtcagaaacggtctgcgccatcatactgatgcctgccgcatgctctatgaagagatcggcggcttcggaaatctcttttgatgtctcattgcttttatcaatggcttgcttggtctcggctaaagcaccgcgccccgcagccaccgccgcaatcgtctcttcgctgcttctcgtcgtttgttttgaacgttcggcgttcgcctttgaatgttcatccatttgttcaatgaattgcaccgcatgctgcagatcttctgaaatggtttgggagccttgcgccatttcttccgtcgacacggacacctgctcggtcatgtccttcagcgtctggttttccttcgtcaaaccttccgcgaaagtctcgacttcacggccgacctctccgatcgcctgaattaaggtgcggagctgttcagccatcattccgaatgagtcattcagctctttcagttcgtccttccctttataatcaagcatttcaacagcaaggttccctcctgcaatacgacgggcattttcagccatgcggcggatcggccctgcaattctcttcgtcagcctgatggaagatatgacggtgacggcaagtatcacgatggtcagcacggctgcgctgtaaacgataaactgaatctggtcagccgtctgcttctgcatgtcttcatagtgatcccggcttttcagattcagcatataaatatcattcagaagaccgttgatgcgggccgccgtccttgtcgcttcagccgggcttttcgaatcaagagcagcgtccgcctccgcctgccatgattcgtattttttggcgagtttgtcataagcagctttgtctgcaccgtccgtcatcgtttttttgagcgccgccagtttgtctgagctgcttttcatatagcttcgcacatcttctttctgggcgtctgcgagcgtataggaatagccggtgatgctttcttttaacgtattaaggtcagcttttgcttcctggacgtttaacagcgcgtccacttcatcttcatttgaagcctgaatcttcatcatgtttacaatggtaaagccgatgacggcggtgaagcaaatcatcgtaacggctgcgttaacgagcagccttgtccgtaatgtcacttcagatcgcctcctttttcaatcaggctgtttttcatatccgtgatctttttcgccagcccgcctgcgtttttgacaactctgatcttagctaagtccatgccgttttccttcagtccgtaaacgatctcaccgcttttgatctccttgttgtctgttaaatctttcgccaattcatagatgacatggtcgacgtttttcactaaagaagagataacggcgtgctcggcggtgtaatattgatcgctgtcaacaccgatggcgtatactttttgcgcctccgcttctttcagtgcgccgacgcccgtgaagccggccgccgtaaacaggacatcggctttttttcggatcatgttttgggcgatgcgctttccgagcttatcatcatcaaacgtaccgctgatgtccgacagcacgcggattttcggtttgactgattctgcgcctttcagatagcctttcttaaaccgtttaatgacgtcggcatctgaaccgccgataaatccgatcgtgccggttttgctcgtcatggccgccagcgctccggctaagaagcttccttcatcctctttaaacgtgacggaggtgacattatccagtcctgatacggaatcaatcagcacaaaccgctgcttcggatattttttggcgaccttttctaaatccgcctgcatgctgtaaccgagccccaccacaagatcattgccttcacggacaagctgggtcagtcctttttcgtatgtaccggtgtcttttatctcccggtaatcaaatgtgatgccgagctcgtctctcgctttcatcaaaccttgaaagcctgaatcattaaatgattggtcgccgaggccgttgtctgtcagcatgatgccgattgttttcgttttttcggccgccgtttcctcagatttgccggcacatcccgccgtgctgagcgcaatcagcagtacagccgcaaatatcgccatttttctcattgaaactctccttttgttttttttctatagttatatatcggttcggatgtcagaatattttatttcaataaaatatgtatgttcggcaggatgttaaacaaatgagggtataggagcttttgagaaaataaaaaacatcggttttggttcaccgatgtttttgcagaaaatttattgtttttcgtatgtccagccgtcttcctgatagaccttgccgtttttcatcagatgcccgagcgcccgcttaaaggcggctttgcttaaatgaaaccgttcgcggatatcgtcaggatggcttttgtctccgtaaggcatcgcgccgtttcttgatctcagataggtcagaatctcttccgcgtcaaccgaaagcgcatcctgctttctcggcagcagtgacatgttgacggagccgtcttccttcacctcgatgacacgccctgtcacgcggctgccgagtctcggctcttcttttctttctgaagggtgaataaacgcgcggatgccttcatcggtaatcagaaaagagcctgatgcaatcagtctgtacaccgtgcccgtcaggtctttattcatgacgtcttcctctgcatccgtaaataattcactgatgatatcttcgggtgccggcttggcaaacatgcgcccgcggcttgtcaccttcagcatgcaatacagtctgtctcctttttgcggccagacggatttgtacggaggcaggtgctccgttgcgacgagcgcgtcttttgacagaccgacgtcgacgaatacgcccatatcttccacagcgtccgtcacttccacccatccgtagtcataaaagctgatgagcggctttttcatcgtcgccgcgagtctttcctgatgatcgacgtaaataaatacgtccacttcatctctgtcttcgatatcctctgtgatttcactgttatgtaaaagaaccgtatcctcgccgtcggttaaaaaataaccgaaatcggtttggtgatctatactaagcgtgagctgctgccctggtctcatgttatcgtccttcctgattcgcccgtatgaggctgatgtttttctcattttttccaatatgcataaattcatgctttatgctgttggacatttctctttattctactataatcaactcataagtgaaatgttataggaggttttctcatggcaaaagaaagttcttttgatattgtatccaaagttgaatttcctgaagtgcagaatgcgattcagatgacgctgaaagaaatcggcacgcgctatgactttaaaggatcgaaaagcgatgtaactttagaaaaggaagagcttgtcctgatttctgatgacgagtttaaactgaatcagctcaaagatgtgctgagcggcaagctgatcaaacgggacgtgccgacgaaaaacattgaatacggcaaaatcgaaaatgcatcggggggcacggtgcgccagcgcgcgaagcttgtacagggcattgataaagacaacgccaaaaaaatcaacgcggtgattaaaaactccggcttgaaggtcaagtcgcagattcaggacgaccaagtgcgcgtcaccggaaaaaataaagatgatctgcagcagattattgcagccgtccgcggagcagacctgccgattgacgttcaatttattaattttagataaattatgtgattcctattgattattgtctctattttcggtaaatttggagaaagggattttcacagttaagttttggaaacccatgacaattacatgaacgttcttatcaagagaagccgagggactggcccgacgacgcttcagcaaccggtgtagtggtttacccaaaccatgaccaaggtgctaaatccagcaagctaaaaacagcttggaagataagaagagagacaaatgattacaaagtcttcttcttaagaagactttttttatttctcttttttccttgctgaatgtgacgaaggaggcaaacaatgggactattacaagacttaaaagaacggattttaatcggagacggtgcgatgggcactctcctctattcctacggcattgacagatgttttgaggaactgaacgtatcaaagcccgaagaaatcaagcggatacataaggcttacgtggaagccggggcagacatcatccagacaaatacgtacggcgcaaattttattaagctctcaagatacggacttgaggatgaaacgaaaaaaatcaatcaggaggcggtcagaatcgcgcgtgcttcctcagacggcgcttatgtattgggaacgatgggcggcatccgcacctttaacaaaaacgcctacagcctggaggagattaaacgcagctttcgggagcagctttatttattgctgcatgaagagccggacggtctgcttctggaaacatactatgatttagaagaggcgcgcgaagtgctgaagatcgcgagaaaagaaacggaacttccgattatgctgaacgtatccatgcacgaacagggcgtgctgcaggacggaacgccgcttcgggaagccctcaggtccattgccgatctcggcgctgacataacgggaatcaattgccggctcggcccgtaccacatgattgaagcgctcaccgaagtgccgattttccgtgacgcttatttatcggtctatccgaacagcagccttccgtctttagaagaaggccggcttgtttatgatacggacgatgcctatttccgggagagcgccgtacagttccgcactcagggcgcgcgcattatcggcggctgctgcggtacgacgccaaaccatatcagagccatggctgaagcggtccgcggactttctcctgtcactgataaagaagtgaaaatcagacgggaagaagaagtcatctcagtccgcaacgaacggaccgagccgggtttaaacgaaatcgccgctcaaaaacggtcaattatcgtagagcttgatccgccgaaaaaattgaattttgacaaatttctgcaagcggcggctgaattaaaagaaaccggcatagaagcgctgacgctcgccgacaattcattggcgacaccgcggatcagcaatgccgcctgcggttcattgctgaaagagcgccttgatatccgttctctcgttcacattacatgcagagaccgcaacatcatcggccttcagtcacatttaatggggctggatacgctcggactcaccgacattttagccatcacgggcgatccttcaaaaatcggcgactttccgggggctacctccgtctatgatttaacgtcctttgacttgatcaggctgattaaacaattcaacgagggcatttctttatcagggaaaccgctcggcaagaaaacgaacttttccgtagccggagcatttaatccgaatgtccgccaccttgataaagcagtaaaacggctggagaaaaaaatcgagtgcggagctgactacttcgtgtcccagcctgtctactcggagcagcagctcattgacattcatcatgaaacgaaacatctcaaaacacctgtgtatatcggaatcatgccgttaacgagcagccgcaacgcagagttcatccatcatgaaatcccgggcattaagctgtcagacagcatccgcgaaaaaatggcgctcgccggcgaagacaagcggaagcagaaagccgaaggcctcgccatcgccaagtcgcttctcgacacggcgtgcgaactgtttaacggaatttatttaatcaccccgtttctccgttctgatttgacgtcagagcttgcagcttatattaagcaaaaggatgaaaagcgggctgatgtatatttgcattgacgcggaagaggccgcctgatatgacaggcggctttttcatggtacgatacagaaaaagaatcaggcaaaggaggattttttcatggttgaagtaaaacccatcaccgcagaagacacgtacgcgatcagacacagcgtgctgcgcccccatcagacgattgaggattgtaaatatgatcaggacagcgtcaaaggagcctttcatctcggaggtttttacgacgggacattgatcagcatcgcttctttctacccgcagaaccagcaggcgttacaggcagcgcccgcctaccagctgcgcggcatggcgacgcttgaggaataccggacgcaaaaagcgggaagcacgttaatcgcctatgcagaacgaaaactggcagatatgggggcggcgcttgtctggtgcaacgccagatgtcacgtaaagggatattacgaaaagctgggctggaaaagcacgggcagcccctttgacatacccggcatcggccctcatgtgatcatgtataaagaactcgcctgaaacagacaaatgcccttggggacatgtctctaagggcattaccctgaatgtcacgtctgcttttatatacggtactattgacgcccttccgcttttttaataccctttgtacattacacaacagcaaggatggcaggcagaaaacgatatctgtcaattgccgttttcagctattaattcagaagaaaaggaagtatgagatgaatacgatccaaaaaccgaaaatcccgaaagaattgccggtgctttctttcacagaagcgcttcaggacgacctcataaaagaagtcgtcatagaaaacgccgtcgtaaacagcaaactggacggcctgcgcgccgaaaaagtcattttcagaaacaccgtttttacggatgtctctttcagacatatggaatgtacggatgtcctgtttgacaaatgtgatgtctcaaacgctgatttcagcggaagcatcatccatagaacggcgtttcagcattcaaaacttctcgggttgaatctggcggattccgccatgcgtcatgtacggtttgaagactgcctcgcaaattacagctccttcagctattccaatatgaagcatgtccggtttgacacgtgcgctcttacagaaagcgagtggaatgatgccgttcttgaatacacagatcttgacgtctgtgatttgaacggcgcaaacttcatcggcacgtctctttttaatatggatatcagcacgtgcacatttgatcatctgcacgtctcacttgagaagctgaaaggatgccgcatctctccgtctcatgccgtgacattcgcagaagcgctcggagccattgtgacgtgattttttattaaatgaaacggcggtcggcatcctgaataaatgctcggcattggtgatgtggggtgctgctttttattttgcggcgcttttgtttcgataaaaggaattcggccaggccatgttgaatgtaccggaagaagagggggaattggaatgtcagacattttaaagctgtatcactaccacagatgggcaaatgagcaagttattcagcatctgaagacgctgcccgcggtcagcttacagcagaaactgaaaagtgtttttccgactgtgaacgccgtgcttgtgcatatataccgggctgattacatttggcttcacgtgctttacggagaaactttcgaacaaatcgcctcgcagtttgatcaatttgaaaagcttgacggagattttgaggcgattgaacatagaatgactgaactggacaaagaattcagcgaatttttaaaagaaatggagaacccggaaggtccgatctctatttctcatccgcgcctggggacgcttcagacgacatatgccgatgtgatccggcatgttgtgaatcacggcacataccatcgcggcaatatcaccgcgatgcttcaccaaatgggctataaaggcgtgccgactgactacatttttttctcatacgaatcataaaaaagcaaaggcctcccgggcctttgcttttttacttcgaatctatcataatccgatatagccggagacgcccgctttttcggccacatcgtaaattgtcattttcatgcttactgatccctcttttgttctctggttttaggtcagtccgttttccggcttacgaatttgcggtattcaagcggcgaaatgccttcaatctgtttaaacagtttggaaaaataggttgggtcctccataccgatggcgtccgcgatcgcccccattttgtcattggttgcggacaaaagacgtttcgcctccgtcattctgactttgttcgtatactggccgggcgtgacgccgagcacctgctgcatacagcgggtcacgtagtcttggttgtaatgaagagccgaagagagcgctttgatggttgttttctcctgatagtgctcctgcaggtaccgggcggcctcccatgcgactctttcctttgcggacgggatttggaacgcttctttctgaagatggagcagcagctcttcaaacagaatctgctttctgagcggcagatcggagttctcggcgctgacatctgtcaggacactgaattgcccggccataaactgcgggcgtctcactttccctttttgcggcagggacagccggtagcgggacggctcttcaaagctccctttttttcgcctcagctccgaccagttgttcccggttgtttccgccatctcataagccgctccctcaaaatgaagccacgaataggatgtcgtttcttcactgccttttgtcccgtaatgttcaagcccgggagaaagcagaatatattctcccgcttcaacggaaaaggcgttttcgtcttctgtaatgtagaggacgccttctttcacatacagcagatcaaacaccgggaagacccgtctcacatgggtttcgccttttttgaacactccatctcccgcagcgataaagaccgggaacggaggaactgtgaactcgagaaaggacatattttcggccctcctttttaagtcggatttttgcaagaagtttcgtttctctccctttttattataagaaaatggaggtacacttttaaacgttgattttgtcaggaaaggggttaaaagaaatgaaacaagcgattttaaaacgggctgcgttcaaacaatcctctgatcacaaactctcattatacgcgctgacttggccgatatttattgaggtttcattatatatgtttatgggaaacgccgacactcttatgcttagccaatactctgacaacagtgtggcggccgtgggtgtcagcaatcagattttaaatttaattatcgtgatgttcagctttatcgcaacgggtacgacaattgtgatttcacagtttttaggatctaaacagaaaaaagaggcgcaggaagtggcttatgtatcaataggagcgaactttgtcatcagtctcgccatcagcgccgccatattttttgcggccgttccgctgcttcatgtgatgggtctttccaatgaattgatgccggatgccaaagtctttttgcaggtggtcggcgggctgtccttcattcaggctttgattatgacgttcagcgccattttaaaaagctacggtcatacgaaggatacgatgttcgttacgatcgggatgaatattttaaatattgccggaaactttcttgtcattttcgggccgctcggccttccggtgttaggcgtcgccggtgttgcgatgtcaacgtccttcgcgcggatcatcgggctgatcgcgatgattgtgatcgtcaaaaaacgcatcggactcggtctgacatggcaaaagatttttcacgtccataaagagcacttgcggaaactcctgaaaatcgggattccgtctgccggcgaacagctgtcttacaacatttcgcaaatggttgtcacttattttatcgccattatgggcgctcaggcgcttacaacaaaggtttatacacaaaacatcaccatgtttatcctgctgttcggaacggcgatcagccagggcacacagattttgatcggcagatatatcggcgccaaacggtttgacgacgcttatgaccgctgcatgaaaagtctgtactgggcgcttggcattgccgctttgacatcagtgatcatgactttgttttcaaagcagctgatcggaattttcacaagcagccctgacattattgcgacggcgagcatgctgatcgccatgacgatcattcttgagcccggccgttcattcaatgtcattatcatcaactcgctgcgggctgccggagatgcaaaatttcccgtctacatggcgatgatttccatgtggggtatcggactgccgctcgcttatctgttcggcattcatttcggattagggcttatgggcatctggatttcatttatcgcggatgaatgggtcagaggcattcttatgtacagaagatggcggtcgcggatttggattcaaaaagggattgcatagacgccctggcttcgttatgaagccgggcgtttttttatgcttgtgaaagctgttttctcatgtcaccgagctctgaccggtaatgtgccgctaaaccggtaacggcgggccttgagtataacggaaacagctccagctcttcagacgcctcctcgaaatacgcctcggcctcgaatgcgatgtactcccatacattcataaaagctttgttgacggtatggctctccagctcttcttccgtatagccgaattgcttcatcacctggcgcgggagacgctttttcgcccgctcgtccgtatggacctccagaagcatccgggtcagctgaatggctgctcctaatgaaacggctgcatggcggagtttctcttggttccggcgcgcacaaaccggcagcagcagcaggccgagggctccgcctgtttggcccgcgtacatcagcaggtcatcaaactcttgatacgttactttttctctgtcagagatttggccggcgataaactcacgtaacggctcttcttcaagcgcaaattgctgccgcacatcggtgagcgcctcccacaaaaagccgtcggcgcgggacccgttcagaaagtcttgtgccgcctgttcaaatcctccaagttcctgcacatcaagccggtcagcttcgtgaaacaaagcaagcaccgcccatgcggcccgcctgttttttggcggcagggatgagaaagtccgtttatataaaggaaagtgcgcctcggcaagctgggcgcatgtttcgtattcggtcatggtatcactcctctgttttttagtgtaccatatgtttcacaataaaaagaccgatatccttcagcggaaaccggtcgcggcactgttattcttctatatcgatacggtacgcctcaaaccatgtatggatctgggcaagatgggcgatcagctgcgggcctttcatcagctggccgaaccacggaacctgaaaagatgaaccttctgtctccagcagcatttccagcttctttctgtcaagcagggtgtgaagcacggaatctttctgttgtaaaatcgttttcagccattctgtgaccccctgcgtgtatttcgggtgatgcgttttcggataagggctttttttgcggtacaaaatatcttcaggaagcagtccttcaagcgcttttcgcaagatgcctttttcccggctgccatgcattttcatttcccaaggaatattccaaacgtattccacaagtctgtggtcggcgaacggcacccgtacttcaagacttgcgcccatgctcatgcggtctttgcggtcgagcagatttgtcataaaccaaagcatatttaagtagaacagctgccgtctcgctttatctgttcccgtctcaccgtctaacagcggcgtttccgcaatggtttcttcatatctcgcattcacgtattctctaagattcagccgtttttgccacttttcatccaagagcgtgatcctctcctcagtcgatctcatccaaggaaatccgtcttcttctgccgcggtgtgaaaccacggatatccgccgaaaatttcgtccgcgcattctccggaaaggctcacgacaaaatcttttttaatttcccggcagaaccataatagcgaggaatcaacatcagccatgcccggcaggtctctgacgagaacggattcctccagatgttcaaccagctgatcctgcgtaatcacgcacttatgatgctgtgtaccgaatgcatttgtcattttatcgatccacgggccgtcatcattcggctgaaaggcgctcgctttaaaaaatttgctgttctcctcataatcaattgaataagtatgaaggggatctctgccttgtttctcaaaatgagcggcggctatcgcggttatcgcgctcgaatcaagcccccctgataaaaacgtgcaaaccggcacgtcagatacgagctggcgtgtcactgcatcctgaaataagtaccgaatgtgagccgcggtttcatcgaagctgtctgtatgcttttcgctctttacattccaataacgccatatggacaaaccgtcctttgagaaagtgaacgcatgggcgggacgcacctcgtgaattcctttaaacaccccgcagcccggagttctggacggcccgagtccgaatacttccgcaagtccgccgctgtctgtgcgggctttcacatcaggatgagcaaggatggctttcaattccgacccaaacagaaaggaagagccgtgttctttataaaaaaacggtttgacgccgagccggtctcttgccccgaacagccgcttgcgcttttcatcccagatggcaaaagcgaaaataccgttcaagcggtccacgcactcctcccgccactcaatatagctgtgcagcagcacttctgtatcagaggtcctctcaaaacggtggcccctcgcctgaagctccttccgcaattcctccgtgttatacagctcgccattataaatgatggtgtacgtttcctcttgatgcgtgcaggccatcggctggcggccgccttcaatgtcaacgaccgaaagtcttttatgtccgaataaaacatggggctctccccagacgtttgaatcatcaggtcctcgttttgaaagagtgtctatcatattattcataatatgtttctcttggacgagctgcttttgaaaatcgacccaacccgcaattccacacatgtgatatcagctccaatcccgtttctgtcggtatcaaattcgtttctatcagcactttacccagtttatgcaaagaaacgcagatagttgatttgtcccactaagagttgtatgagacaagcccgatttggaaagaacggaagagaagaaacaaacaaaggagaccggcacggttatgaaacgaaaacagcttttctcagaaaaaaacaaatgggggcgcggcaccctgatgatagaggacggcatctgcctcgtcgaaaacgatgaaggcgatatcctgctggcagacagtctaggaaacgcagacgtattgatgaaacgcggcggcagatggcagccggcacggatttgcggcggtgcggccgaaatcggcgcagacaccatccccctgctcggcggggaagaaatccgttatgaaaaggcagtcaaacggccgctgttaaccttgctcgattcgctggacgatgaaacgtttctgctgtttctcagccatcttcacgggttcggcctgtctgtatatgattgcgtattttcctacaatcaggcgctgttttccggtgaaggcgtttcgttttatcacttctcggcggatgacgcacaatgcgccctgcagcatcaccgcggcagctcgggtaaacacgacagatttgaatggacggcatctgacgggcggcgctccattatgtattcagcggcaagacaagacggcaccgcgtaacaaacaggcggcaccttttaaataggtgccgcctgatgtatttagctttgtttttcacgctgattgacgcccggcgtttgcttttacccttcacagccgtagcttttgcggtagcaagagtgattgacgcttttggcatcctgcaaatctccttcgcctcatcaacatccccctgccacggcatttctcattcagcggcacagttgcgcagaatgtatgcgcaactaaaaaaacccggatgcatccgggtttttcaagcgattgattaaaatacgtgaaagccgatcggcaagtgaaggccgagcagcactgtcaggacgagcacgataataaaaccgatccacagtccgccggttgatttgccttttttcttgcggatgacgagcatttccatcagtccgatggtaatgatgccgagcagcatttttccggcgtactctccgttccaattcgcaaaacggacaaaaagctcagctccggtcagaataataataatgtagaataagcgcagaatcatatgcgtaatttttgcgcccttcgcttttccggaaccgtacagcccgtagctgacaaataccaggataagcgcaacgacccatgaagtaatatgccaatgtgtcattatgttcaattccccctatcagatcaatctgcctcacttatggtaccacaacaagccgatcggagcattatcaatcgtgcgaaagacacacaattatccgatttggttcgacagcgtgccgatcggttcaattgtaatgtcaatgcggtcccccggctttaaaaatttcggcggcttaaacccttttccgacaccggacggcgtccccgtcgctataatgtcaccggcttcaagcgtcattccttttgacagcgtttcgattaagtcagctatcggaaaaatcatgtcacccgttgatcctgattggcgcagttctccgttcacccgcgtttcaactttcaggctttgcggatcactgacggccgacttatgtacaatgaccgggcccatcgggcatgtcgtatcgaggcttttgccgataaaaaactgtttatgtttcttctgcagatcgcgcgctgttatatcatttacaattgtatagccgaatatatgatcaagcgcatgttctttggagatgtgcgatccgctttttgatatgattaccgcaagctccccttcataatcaagctggtccgttacgtccaagtggctgtccactgtttctccgtgtcctgtaacggcagcgggggctttcgtaaaaaccatgggatgctccggtatatccgcctcactccccatttcaacagcatgatcacgataatttttcccgatgcagatcacgttctttgaaggtctcggaataggcgcgcaaagctttacgtcagacagcgcatacataaatgaacccgactcgtcattcggttttttcgcccattccgcaagctgtccggcatgcgcgacaaacttatctcctttttgaatgcactcgatcagcgaacccggaatcgtctcaagttcaaacaactttttttcagccttttgcagatctaagattttgtcatcatcaatgatcagaccgacaaatgttcggctgttcagttcccctgtcgcaaatttcatgttaatcccccatcatttttaaatctggcattcctttatgtattcttcctccgggcgggaaattcctcttttaaacaggctgaaaataagtgtaaaagagtatcaaaaattgtcacttttttagtcatattgacgaaataaaaccttcttggccaaaatgggttatactattgtcatcctatgttttccaaaataatcgagaattggagatcacacgatgaacaaaattgaagaaaaaagattaactttattcgagacagcgcaaaaattcggaatcaatgcaacggagaccatcaggtgcagccaggagctggacagccttttaaacgggtgccggggcgggctcatccaacaaacgaaagacagcgggctgaacccggccgcacagattgagcacggccgcaccgcaggaaaaaaagaggctttctcataaacgtgatatgtatataaatctgtatcatttatgtataagacccggcatgcgtaaagcgccggtgtttttacgtctaaagttttttccgctcacaaaaatgtgcatttgtcataagctattttaggcaggcagcccagataagctcctggagtgtagtcatgaaaatcttcacgaaaaggatgtgctcgtatgcccgcaattgtcggagcgtttaaaattaatgccgtcggtacgagcggagtcgttcatataggcgactgcatcaccatttctccaaaagcagaggttaagacatttgccggagcgggcagcttcaataccggagacaatctcacactgacgaattacaggaattcaacgaatgtgtacgataatgatgtaatcgatcagccgatggcaggaaacgcataaaggaggcgccgtatgaatttttacgtcaatcagtcgatccatatcaattacatgcgtgtagaatctgtcagcaattcctccatactgcaaatcggaagcgccggttcaattaaatctctttccaatctgtacaacacagggagttatgttgagccggcgccgcctgtcaccgcggggcagcagactgtaacaacagggggaggtcccggcacctcatcatttgtaccgctccagccgccaagccggtagttttaatgaaggaaacgagacgcgaggtgaatgtcatgtatgatcaatccgtttcatcctacctgcagaatttaaattctttcgtccagcagcaggcgcagcagattcaggagctcgaacggcagctgaaagaattccaaaatgaaatttcaacgctgaagcagcagccttctacaagaatcgatcggctcgagtataaatttgatcagctgaaaattgaacggctggaaggaacgctgaatatcggattgaatccgactgatccgaatgccgtgcaaaacttcgaagtcggccagacatctccgcaggtcggaatgatgcagcaggaacaggcgggccagcaaatgcagcaaatccgccaaaacgtcgatatgtacctgaatgaagaaatccccgcgcttttagagcagctcgaaactcagtatgagagcaggctggacgaaacgaacaaatatcatattattgaagatatcagaaagcagatggacagccggattcagtattatctgtcccatgtcccgaaagaagaaaacacggcgcccgcgcaatatgccgagcagattgccgaacatgtgaagcgtgatattgtcagagccgtcgagcactttattaagcacatacctggtgaaatgaaaggtgatgatccgtcatgatttttacagtgattaaccggaatattgaagtcggcgacatccggtctaccggtgtgtccagttcttccttattattaatcggcgacaccgattccgtctatctgtcttccatctttgacacgcctccggaatctcttattatcgggccttatgtgccgctggcgccggaataatgttaaagcgcatttcacgcctccggaacgccaaaatcaattcagtcgggattgcgagtgtctttcaagcaggcgatacgaatgaaatcaatatgcggatcaaagtattggccgatcagcgtactattgccttatacagagatgatgaaggctcatttaacaaaaaagaataccagatctttcggcagcccgccgtcatgccgttaccggaaacgggagtccaaagcgcattctgccatgaaaacccttcaattcgggtaaggaatgtgaaagttcaaggggtatcgtcagcgtccgtggttcaaatcggatcgacgtcgatcgttctgggagattcgcggctgaaacatattaggcagattgtcacaccaagctcacaatcacagcagccctgacatataatgacggtgagacttctataaagggtgtcgtttatgccagcaattaccggacctatagctatcaattccatatcgggcggagtcgtaaactttggtgattccttttacctttctccaaaaagctcttctaaatctgcgctcggttcgggagcaggcaataccggagatttcctgttattaaacaacgttgtcaatgcgacaaactatatagaccccgatgtcagcgatcaaaatgtggtcggaaacgcctaaaaagcagccgctctttcagaagagggctgcttttggttcagcgttattttcgttcatttgctttttttgtttttacaagcttttccggcggctgttttctgatccatttcacaaaccgcgcgagtttcgggtcacgccgcagctcttctattcccgcgagccttgccgcaagctcctgattcgtatagagagcgtgaacctgtttatgacaagggatgcagagcattgcggtcggaaggaatgtcccgcctttttccttaggcgttaagtggtgctccgtcagccgtacatgatggcggccgcataattcacatgtgccctcggcagaatcggccataattccttctcctttctacatgatctccaatgtgacccgggtgcctttcccgcccggctcggacggatgaacgattaattttttcggcagacgcgctctcagctcctgcacatggctgatcactccgacggataagttgtccgattgcagcttttcgagcgctgtgacaacggtgtctaagagcccttggtcaagagtcccgaatccttcatctaagaaaaagaattgcagcgggtattgcccccgcagctgaatctgggcggacaaggcaagcgcaagcgacagcgatgtcagaaacgtctctccgccggaaaggcttgatacgggccgtttgacgcctccgttcgcgtcatcacgcatgacgaaaccgccttctgaatcgactaatatggcataccgctgccttgtcaaagctccgagacgggcagaggcgtctcgagccacgctttccagctgttcttccgctaaaaattcgacgaatgtattgcctttacatacagactggagcttatcaagcctgtcaatctgtgtctgccagcttttcagttcggcttcaatctctttaaagcgcttatgctgtttttgcataaccgcgaaagcttttgcctgtgctcctttttcctccatggcggcgcctgactcagcctctgcctgcttcagcagagaaacggatgctgtccattcttcctccgatatccggcgctcggctaatttatcagtaacacggctgatatttgccgatagctgttttgaggtgtccaggaactcatctatttcttttttcatttcctctgcacgcccttgcggaagcagactttttttgacttggtccgggtcggcaaacccggtgtcttttgacctcacgcgccagtcgttttgcgctttctcaagggaggtctcagcatccctgagtgacatgagactcccggattcccggccttttgcgtcattcagtgattgctgcgcctgcttcagcgcgtcgaatagggactgttctttggattttaacagctgtaattcctgccgcaccgcttcaagctttgcggaaattgatgtttcttcagctgctgttccgagctcttgttcatatccgtcaatcacctgctgcaggcgctcagacgcatagtgaagctcgagccgttcccgttcaagccgatgcttcatctcctgcaggcgttctttctcctcttcatgttccttgaggaatgcgatgcttgtttcaatgcgcttctcacattcttctgcctgcctgtccttctcatctatcgaagcctgccaggcgtcaatccggtttggcggaatatcaccgcagacttcattgtactgattcaatcggctttctgacagcgattcaagctcttctaatgaatgtctgagacggccggcttctttttcctcgtagcggattcgttcggcaagctgctcagcttgtttcaccgtctgctgatgcgcgctgatcagtcttgtgaccttctcttttaccgacagcatatcctgtttcatttgtttccactccaagcggacggcgctgaacgcttcatcaagcgggcgtccgctgatggaagaagcggcttccagctccggaacccgggcgctttgcagaaacggacattcttcggtaaaacgccccgactgctcttctaatgcaaccttggctgtcagcacctcctgagaaagagccgccgcctcagaaagcagcgcttcaacctgctgcaactgttcctgcacagccgtatcaggcgagaatgtttcatgagcggaacgcgggcggtcatgctgcgtcgagccgcatacaggacaaggctttccttcgattagtttttccgataattcttttgttaatgcagccgttctcgcttcctctgagcgcctgcggagatcggcttgcgttttgtcagcccgttcggctgcggctttcagtgaacgttccgtttcacagaccatatggtaaacggtttgaagcgtttgataagcgcgcgtaatgtcttcctcttccgttttcgctttcgctgtgagcgactcgctttctccgttcagcttctccacgtttttcagctgcgttgtcagattggcccgctctttcgtgatttgttcctgtgtctgctgaaagcccgccgccagctgtgctgcggtctggcattttttccgttcatcggcggtcacttgaactgctttcagctcttctttcagctcattctgcctgttttggccgcgggtcaggcggtctttcactccggccagctgtttcgaggcggcttcgtattcttcctcttttttgctgtgttccgcatttgttttttccgcttcttttttcgcttcaagcagtttttgttcaatggctgaaagtctttgatacagctcttcttccttgacaagcttcggctcctgttcggccttatgggcccgccatgcttcataggcttcattttgccgggtaaatgaaacggtttccgcctctgatttccgtttggccagttcgtgttcccgttcggcgcgctgcttccggcggacggcttctgtgtaacggtctgcgtacggctcaagggcgagagctgtttccgcctctttaagacgctcagtcaaatccgtgatgtacgggcgtctttcctcaagctttttctcccggcgctcatattcatctctttctgtctgcaggttccaaatttcctggtgattctcaaagcgctcttttgcccggacccgtttcttctcagcttcttcaagccgttcgttcgcttcgtgaaactgctgttcagcctgcttcagcgcatcttctcctgcgtctccgagcccggattgttccgccagcatttcattttttttcgctgccgcttcctgcgcccgccgccgcaattttttgacaagcctgtccccgtactgttccagattaaacaggcgctggagcatatgtcttctttccgcgcctttaagcgacagaaactcggcaaactttccttgcggcagcacgacggctcttgtaaagtcgtcaatggtcaggccaagaagctcctctacctttttgttcacttcattcgctttatcggccagcaccgtttgttcgtctttgatttcaatcaagcggcagagggcggtttttactttcgtttcatccgttctcttaaaaacgcgctcgaccttgtaggaaacccggtggccggattgaagcgcgaatgtaaatgagacggcgagctgctcttcggcatgattcaggatgccgtgcgtattatttgcggcgcgctccacttttccgtataaagcgagtgtcatggcatcaaggattgatgattttccgcttccggtcggcccgaaaattccgaacaccccggctccggacagtccggcaaaatcgatggtctgttcctctctgaagctgtggagcccttttatcgttaacagaatcggcttcatgtcgcatcctcctcatcatctgttgacgcaagctctaaaaacagcttgaccatctcctcatccggcacgccgccgcccgtttgtttttcataaaacttcttaaagcgatcctcaattgatgtgtgtttcacttcaatccggtcattgccggtctctttttcttcaaaaaccggcctgatatggataaagccgggatgcgcctttctcagccgatgaatttcctcgagagaaagctgatccgtcaaatggatatcaagatcgatccaggcattccggtcacgcccttcatcgagccagccgtgaacctcgctcagcccctgcgctttccatttgacgagcggtttaccggaagacaggaaaatctcttcccacttcgcttctccgccgggcttcgcttctaccaccgtcaccgatttggcataaccggcttccgaaaagctgtatgccagcggagagcccgaataacgggcagccgtcttggcgcgcttgatcgtttgcggacggtggagatggccgagagccacgtaagccgcatcagccggcaggctgtcagcggcaactgtgtaagcgcccccgacttcaatcggacgctctgaatcggtctgatttccccccgcgacataaatgtggctcgccgcgattttcacggcatcgtcccggcacagtccgcacatgtgagcaaacgcctctctgattttgacatcgtaatgatcgcgaagaagcttttcctcaaacgtatcagaaagcacttcgtttaatctcgcctctgacggatatgccagcgcagctacggctaacagctcgtccgccgacggcacttcaatatgcacgggttctgtccgcggatagccgattaaatgaatgccgcgctcatttgttaacggagaagccgccgccagcctgtcaggattgtcatggtttccggcaatgacgacgaccgggcgctttccgccgtcagaaagcgcggaaagactttcgtaatacaattgttcagcgagcgcaggcgggttgaccgtatcaaatacatcccccgccataatgaccgcatcaatattttcttccttgacaatggtattcagctcttccaatacctcggcctgctcgctcagccggcttctgccttccagcgttttgccgaggtgccagtcagctgtatgtaaaatgcgcataccgcattcacctcactttttgatagaaaaaaagatccgctccaaaaaggagcttcggatcttgttacagtgtaagaacgtgacctccatcgaagaaatagagcgcacgccctttcactttcgtttttgtaatttgttcaaccgcttttgtatacaattcaatttgtgtttcataccttttttgcagaatcggagccgcgccttcaaatccgttccggaatttcccctctatccgatctgttttatagtccagcaaatagagaccgtccgcagtttcgtagaggcagtcaataatcccctgcacgagcagcggttcaccggccgtttcggcatccttgtacacctcgccggccggaagcgccatactgaacggcacttcccggtcaacccgcagcgccctgagaaggtctttcccgatttcagttccgaaaaactggacaatttcttctatatcaatagcttcctgctgttcttctgtcagcagctctttttcgtaaagcatccggaccgtccgctccgcttcttcggcagtcggaacgtgcgtcagcggtatgtgctgcatcaccgtatgcatcgccgtccctttttcggcggctgtcagcccttttttcatcataaaaccgggacgcctgtataaaagcgtgtctcctgacggtttgatgagagagcggccgctgtattcatcctcgtattcttgctttctcttcagctcagaaactgattgcttcgttctgatagccgtcagctctcggtacggatattcccattcaagcagacggcgcgcctgatcatcaaatgaaaacgaatcaggaatcggctcgccctgctgtattgcttttagacgtttgctcttttcttcagcacgctcttttggattctcttccagcaattcactttgctgcagcatccggatgtgaaaacgcgacgggtcgcgcgcgatatcctcagatgaggaaagtcccggcgtcctgtgcgcctccatgtcacggtggcggatgagcgccggcccgataaagtccaaataagatgacgcctgatagcggtcgaattcagaaagaagccaatcggcccggtctgcttgcgcctgccatttggccagctgtttttcccggtttttgcaggaaccgacgagaaacagcttttccttcgctctggtcagcgccacatacagtacgcgcaattcttcggataagagctctctgcgcatctttttcttcatcgccacaagcggaagagtcggatagctgattctgagttccggatggatatacttcgtgccgaaaccgagctctttatcaagcaggtatgatttgttgagatccatcatattaaaacttctgccgagtccggcggtgaaaacgacggggaattcaagtcctttgctgctgtggatcgtcatcagccgaacgacatcctcctgctcgctgagcgcccgggccgtccccagatcatcgccgcgctcctgcatccgttcaatgaaccgcaaaaagcggaataacccgcggaacgccgtcgcttcgtacgagcgcgcccggtcatacaagacgcgcagattggcctggcgctgctttccgccgggcatgccgcctgcatagtcaaaatatccggtatcgcggtatacttcccaaatcagctcagacaccgaatgattcgtcgaaaatgaccgccacttttgcagactgtcataaaaggttctcagtttttgatacagttcatcatgtctgtcagcgttcgctatatatgctttcagcgcttcataaaacggcgcttttttcttttcaaggcgtatcagcgcaagttcattttcgtcacagccgacgatgggcgagcgcagcacggaagcaagcggaatatcctgatacggattatcaatcaccttcaagactgaaagcgccgcagccacctccacggcttcaaagtaacccgacgtcaaattggcgtacaccggaatgccctggtttttcagctcttccattaattgcggcgcccacggcatggagcgcagcaaaattacgatatcccggtactggatattccggtgtgtttttgttttgccgtcatataccttaaacggagatgagacaagctttcggatctccccggctatcgctttcgcttcccagtgcacagtttcaaagtcttcggcatcctcggagctgtctgcgccatcagcgctgtcaatgagcagcagttccgtttttgccgcgtcattcggcggatacgatgcgccgagcttcaatgccgcctgttcatcgtaatccacttcgccgatttttccgcccatcagctgcttaaacaagaaattcgtactgtccaaaatatcggagcggctgcggaaattttggttcaggtcaattttctgccccgtgcctgccccgctttctgtaaaccttttatatttcccgagaaacagcagcggctcagcaagtctgaaacggtagatcgattgtttgacgtcgcctaccataaacagatttcccgcctcttcattcccgcttttaacaagctgcaggatagactcttgcacaagattcgtatcttgatattcatcaaccagaacttcatggaactggtcttgataataaacggccgcttcgctcggcacccgccggccttcttcatcaaccgcagttaaaatcgccaggcagtaatgttccaaatctgagaaatcaataattgatttttcttgtttcgccgcttcaaatcgttttccgtacgatatcacgagctgaacgagcgtttcgatgacaggcttcatatctgctaaactctttaagtgatcttgcggacttcttgtaaaataatcggtctttaccttttcgatcagtttcttcgcgccgtttcgcaaatcggtcgcttcgtccaaaagcgctttgtcaaattcatcaccctttaccgccttcgcccgtttaaaggagactgcgggaacccgttcatacagcgcatcgaagtcatgccggcagctgatcagctcttctatctgctgaaggtcatccagaaaattatcagcgcgcggggccggcccgccgggcacttttgtcagttcaagcgccttctcaagcttttgttttgccccgaaaagcgccatttcagcatcttctctcacatattggtaaaacggaagctcttccattttgctttcttccgtcacatcatacaggcggacaaagctttgcagccatacttccgggtcaggatgcgaccgggaatactcgtacacccgtttgacaaggtcttgaagatcaagatcatgcctgtctgtcgtatatctgtccgcaagctcaaaaaacgcctgattcccttttgcgtattcatcttcaaacagctcatcaagaacttcgtctccgagcaattcgccttccgtctggtcagccatccgaaaaccggggtcaagatcaatcatataataatattttttaagcacttgcagacagaaagagtgaagcgtcgaaatgctcgcccgattcaagagagagagctgccgtctgatatgcagagatcccggatttttggcgagctctttttctaatgcttccgcgatccgatgcttcatctccgctgctgaggcgtttgtaaaggtcaccacaaggagcctgtcaacatcaaccggatcttcttccgcggttatctttctgatcatccgttccacgagcacggccgttttacctgatccggctgcggcagcgaccagaatatcgcggccggaagaaacgatggcgctccattggtcatccgtccatatgctgtctttcggtttaggaatttgcatcatcatctgcctccttcttcagccaatccagtatggtgccgtctttttccgctttcaggctgcggtattcattttccttaagcgactcatcaaactggcacaccgattgaaacgcacagtacgtacaaggcgtcttatctttcagcttatacggagtaatggacacaagcccgtccgttatcgcttcgcccgcctgttcaaatgtccgccgcacatggtctgtcagcagatgaaagtcccgttcgctgaccgcggctgagtcggatcttaaagaaccgtcctttttcaaaccggcattgacgatatttgaacgcccttcctccaaagtcgtgtccatcaggctgatcgcctcccggtcaccgaggagaaggcctttcattttaaatttcttaaaaatttcctgctcgatttcatcaagccccatcggcagactggcctgaatcatcggatcgtggatatggaaatacaaaacgcctgccggggtcgctttcatgccgagccaatcttcggaatgtgtaatcgataagtcaagatatgtgagcatttgcagagcgagcccgtaatacacctcagccagatcaagccccctgtcgcttgatttataatcaacgattctcagcagcaggccttttgaactttccgctttatccacgcggtcgatccgtccgacgagttccatcgtacagccgtttttcagcgtgaaagtgagcggcggcagcggcccgcttccgccgaaaccgagttcaagaccgaccgggacgaaaccgctcgccttcgcatgctcgcttaatatgccagaaacacgcgtgacgatcttctgcagtttttccttcacataaaagtgtctgtttgagctgagcagaatctctttttgcagctttggcgcaagccgttccaccgcttcataggagaaattccggcactgatctttcgtcagatcgcgccattccagcttctgctcacgaagccggtctgaaatcagcttcaggctggagtgaaacagctggccgatatccggcgcgtccagcttgaaaaactgccgctcttttaattgaagcccgtgagatgcaaaatgagaaaactggcaggcattaaacgcctccatccgggagacgcttcctttaatatgctcgccgtaaagctggcgcgaaacaggccgttcaagacgcttcgcctcattgcggaaaaacaagcttgaaaacagctttttcgcacgctggtgatcaggctctttcatcagcacattgtatgcgctccaccatacgtcactgatctcgtactctcttgtccacagcctgagctgacttgccgtatatgtctgagccacctgtttattgacgagatactgaagctgctcttcttcgcttacctgctcgggatcagccgctgacagcttttcctgatgatcgggaaacagctcgccaagcctgtttacaacgattgacggcaggagcgtttttccttccgcatcggcaatcgggtatgacacataaagacggtcagacggacttgacagcgccatatagatgagaaaatgctcatcaagcagccgctcacgccccgcggaagacagctccactccgactgctttcagccactcccggtcatcatcagacagcacgccgttttcatccgggcgcgccggaagaacgccgtcattggccccgatgacgaatgtgcaggacgtgccgtacattcttgagagatccatattccctacaaatacttggtcaagcgcaggcggaattaaagaaaaatgaagcgattccgttcccgtttcaagcatttgctggaacagcgccaaagatatttcatcttcacccatcatgccggcaaactcctcgagaagctggataacggcatcccacgcctggccgtgctgctgcgcttcgatcatgtttccggcctcttcggcccgctgccttttccggtccagcttcaggggaacatcggtatcttccaaaaagagataaagagcctccgccatgctttgaaccgttttcgcttttttcatccggttttgaagccggacaaggggcgcggccatccactctttcgtctcattcagcatgttctccatctctatttcctgatctgtctgcgcgaaatcctcatcgagcgatacgaagcgcctgtatacaaaccgctcgccgctcgtccagcgctcccctttaatgccgtaggcgatacagtaattttcaagctgatcaacctgctcccttattttctgctccggctgatcaagcgggaataacagttcggttttcgcacagcggaacaccgcttcatatctccagttccccttcacgacatccaggcttgaacggatgaattcaataagcgggtgatgctgcatagaagcttttccgtcaataaaataaggaagcccgtaatcggcaaacacttccttcagcaaatctttataatcttccggctgacggatgagaatcgccatatctttgtaccggcatcctccgtcccggacaagtgattgaatttcccgggcaataccttcaagctcagctcttctgttttgcgcctgcatgacggtaaaagcttcctgtccgccggtatacgccgcggcgggacgcacatcgtactgcgactctatacaggcaagctccggcgcatgctgatgccgcttcgtgccatgcagttccttgcaggaaatatcggcattcaattcctttgccgtctgataaagcttatagtatgtgcttcccgtcattctgaacagatcgagctcatccggtgcctgttccgccgaagggctgtccgccgtcagcgagaatgtgacatgttcagcatgcatgatcagctgctccagcacccttaattcctgcggcgtaaattgatagaatccgtcgacgtaaacacgggcgccttttacaacgtccgccaaaggaatctgctgagcgagcagcgtcaaataatcctctgaatgcaaatagtgtccggcgaggcttctttccatctgctgatataaaatgcctaaatcatgaagtttttcagacagcatccgctctccgcgatattctgacgccgttccgctttccgccatgcgtcggacgtcttcaggctcaatacagtaccgcttaaactctgtcagcatccgttccacctgctcagtgaacccggttttgtcactcgctttttgatacactttaaactcgtgcttatattcttcaatcaatttccttaaaagcatctgcacacccgtcgtcgtcacaaacgggcggttcatgcccccggtatgctgaagcacgcgccacgccaaacgcgagaaactgaacacttgagcgcgtatcatgccgccgatatccggcgttttagcaagctcatattccattaaaaacgtcatttgatccgggactagaaaaatgatcggtttcccgaacggctcccggcgcagttcatcttgaatgctgtcgataatcagcctcgttttcccactccccgatctgcctactaaaaactcaacacccaaattagaagacccctctctttttatctttctacattttatcgaaagttgacgaaaatgaccaatctcatctgctggtaaaaacgggatgactgttttaaaaaatatcgtttttgaccaaaataaagaaaaaaggactaatgatgatgtcagaatatcccgaagtaattgtacggacggctctgtcgttcagcattctgtttatcggcgcccggatactcggtaaacaaaccatttcacagatgacgctttttgatttcattgcggccatctcgctcggcgccatcacggcaaatctgtcgtttaatacaaagctgccgattcattatcatgtcattgcctacattattttcgtggcaatcatttaccttgtcgcatatctttctatgaaaaacagggcccttaggggtttctttgcaggcaaaccgaccattatcattcaaaacggtaaaatacttgagcataatatgaaaacgatgcgttataccatcgactacttgaaccagcagctgcgtgtaaatgacgtatttgacatttctcaggttcagactgccatcattgaaacaaacggcagcatgtcagtggaggtcaaaccggaatttgcgcccgttacaagaaaggatctcggcatctttgccggacatgaaaagaactttgccgttgagctggttatggacggccggctggtgatgaagaatctggaagaaaaccacgtatcggaaaaatggctgagagaagaattggacaagagaaacctcaaaccggaagacgtcgtatacgctgtgcgcggaagcaacggccggctttttgtcgacacatacgacgaccatattacatcgccgctagatcaagaataaacatgacatccgcacatgtcacgggctgccgccgtataataccctataaacatccgggggtgagtccaatgcacgagaatttttttcattatacagccatctgcagtgacgattctgtgcttatcaaggatctggtaaaatccataaacggtgaatacagcgctgtgatttgctactcaatattagccgaaaaagcgccgaccgcagaaatcagaagacgaatcgaacatatcagagaggaagaagtgcgccacctgcacgctttctcttcactgtatacgtcaattaccggaaaacagttgacgccgaaacagacggagcattgtccgcacacatacagagaaggactgagggcggcgttttatgatgagcagaaaacgaatgatttttatttgcaggcatccgatagagcggtgcatccggaagcgaagcggttatttgcccgcacggcatttgacgaacagcgtcatgccgtctggtttttatacgatatggcccactctccttcccaccatacagggggaacggtatcaaacgcgccgaacacaagctacaccgaggtgaataccggcaaataacggttcaggcagatcacgctcccccgccgggagtcttcagaccgctgacaaaccccgttctttcaacatgagagaatggggtttacttttcgagccgttttatactccctctaaacaatggataccttcttcattgtataatcagcaaaaaccctttataataaaataaaccaactggtcggttttaaacgaaccgagccccgctttgccgggacaacgatatgaatgaggcggaaaggatctgtgtgaagtgacaaatacaaaaggcggtgccggaaagagcgaaaagacgaagaacaggctcgtatccgcttcgcgtgacttatttgcaaaaaaaggatattcagaaacatcgattcgggatattttagaggcggccgaaatcagtaaaggcaatctatatcaccattttaaaggaaaagagtttctgtttcttcatatcatggaagaggatcaccgcgtgatgatcgagacgtggagggaaatggaagctgatctgaaagatgctgccgaaaaactggcgggctttgcggagctgctcagccggatgagcatcaattacccgcttatgagagcaagtgaagagttttatgcgagtgcgtttacgtcagaggaggtcgtaaagcggctcaacaaaattgatattgaatatgacgatgtgatgagagagatcttagaagagggaaatcaagacggcagctggtccattcatcatgtcgaatcaaaagtaaaaatcctgctatccgtcttctacggtttagatgtgttatataaaaacgataccattcagcaaagaatcgaattgcaaaaagaagccatctccgtgtttattcacgggtcgatcagcgctgataaacagaatgacagctgacaaaggagaaacaacatgcaaaaaccgatcagagaacaaaaggctgtactcatcatcttattaagcaatatatttattgcgtttttaggcatcggattgatcattcccgttatgccgctgtttatgaatgtgatgcacttgacgggcagcacaatgggataccttgtcgctgccttcgccgttgcgcaattaattgcatcccccattgcagggagatgggttgaccgcttcggcagaaaaatcatgattctcgccggactgtttttgttcgcattatccgaactgaccttcggattgggcacacatgtctccattttatatttcgcaagggtgctggggggcatcagtgccgcttttatcatgcccgctgttacagcgtatgtcgcagatattacgacggtgcaggaaagatcgaaggcgatgggctatgtatctgccgccatcagcacagggtttatcatcgggcccggcataggaggatttattgccgatcacggcgttcgtatgccgtttttctttgcggcgggaattgcatttatcgcagtgatttcctctgtctttatgctgaaagagccgttaactaaagaagaacgcgcaaagcagctggaaagcgtcaaagaatcaactttcttaaaagatttgaaaaagtcgattcatccaaactacttgatcgcctttatcatcgtttttgttttggcattcggactgtcggcgtacgaaacggtattcagcttatttacaaaccataaattcggcttcacgccaaaggatatcgccattattattacgttcagctccattgtggcggtcctcattcaagtactcgcgttcggaagacttgtcaacttcctcggggagaaaaaagtcattcagctttgtctgatcatcggcgctgtgctggctttcgtttctacggtgatgtcaggatttttgcccgtgctcgctgtcacctgcatcattttccttgcgtttgatttactgcgcccggcactgactacttatttatcgaaaatcgcaggaaatcagcaggggtttgttgccggtatgaactcaacatacacgagtttgggcaccattttcggcccggctctgggcggtattttatttgatatgaatattcacttcccgtttctgttcgcaggtgtggttttatttctcggtctgggattgacctttgtgtggaaaggaaaagcgggcgaggtttcggagtagggtgcactcacccatctccggagctttttttgcgtttgcgataagaaaaatgaatggattatgagaaataattcattatttatttatctcaaaatctatactatagtaatagtaaggttaacgagcttaacaatttaatatgaatgtttcaggaagaagggttttcattgaagaaagacaaacatctccttacggatatctggtttattctcatcagtgcggcaggggggtttcttctttcgcttacagggatgtcgatcgcctggatgctcggaacgctggccgccggctgcatcctctccatgacgaggccccgctggctgttcatggcgcctgacagaagagggattcaccgcagatggcttgcagcgggacaaatgatcctcggcatcgaactcggccagaaactgaacctgtccgttctgtcggttttacgggagcattggcttccggtaggcttcatgctgattttctctatcgtgatggcgcttgtttccggatatgtgctctttcggttcagccggacggacatgatgacaagctttgtaggcacggcgccgggcggtttatccgccatgccgggtatcgcccaggaagtcggcgcaaacaccgcgattgtaagccttattcagctgacgcgcgtccttttggtcgtcatgacaataccgtttctcgtcattttcttatttaccaaacaaaacggtgcagctcagacatcagccggagccgtttcggcaggagcttcacatccgggccttactcccgtcttgttaacggccggatttattttggctgcctggcttgcaagcaaaggcgcaaaacggctgaaatttcccgccccttggctgctcggcagcatgatcggcgttgctgctgcggaaatcggcgtgtccgccttggcgggcaaagacatgctggcctggtggccgccggaagcgaaccagctgtcacaaatttttctcggcgccacaatcggatcaaaaatgtacaaaagcatgttcaccggcgtggcgagagtgctgaccgtcggatttatttcttccgtcggattaatcgccgccatgattctgagcgcggttgcggtttctaaattaacgggcatctccatgattacatctgttctcgccttttctcccggcgggatcgccgagatggcggcgacttcgatcaccctgcacgaagactcgactttcgtcgtcgcggttcaggtcatccggatcgttctcgtcatcgccatgcttccgcccttctatcggctgctgcaccacctttctcagctgaaacgggcacacggcgagagaggccgggcagaaagaggaacatgatccgaataaaaaaacacgcatccatatgcgtgttttttatttgaacagctctccgccgccatttacagaccgccagtttgctgaaagatcacggaacagccgttcagcaaataacagttcttcatctgtatagcggtctaaaaacgccaagagccgcttttttatcaattcatgatattcatgatgaagggaatgcagctctttcccggcaggagtcagccggaaatagacttcttttttattgtcgctcagccgggtcctgcgcagaaagccggcttccaaaaacttcgcgcagcttctcgacacggtcggctttgtcgtcttcattttttccgctattgacgtgacattgatcggttcatgatctccgatacacgacaaaatgtgaatttccgtcaaggtcaactgtaatttttttccgttttcttcacggagttcgtccatccgtccggccaacgacgccctgatgtcctcctgacacctctcctgctcgtgaaaaatatctgtcagcccttcaagaatcatgtgttttgcatggtctggctgtcttctgtccaactgctgaatcacccttccgtattgattgtttcttttactataacgttttgttacacaagaaacaatcacacaggcgcataaaagggcatcagatgaatccccatctctccaaaccggccagaacggcttcttccgcttcacgtcccgagccgccggctgcccatgccgcgtggccgtccggccggattaaaacggtgtggacgtcatcccaatcggcacgtgtttcagcaagctccgcactgacagctgccacgctgtccgtatcaataccggcgggaatgctccctcttaatgacaaaagcacaaaggcgcccttatgaagaaaatcatacagccgggccggccgcccgtcatgaagggtcaattcgatatccggcaggcgttttccgttcaggatatgcggcggcagctccgcatccggttcataatgcagatcaagcgcggatacttttcccgccaataaacggttggactcctgaaaatccagcaaagcggtcatcgtttctcttaaagccatccccgactcggtaaaatccatgagctttatctgggtttttatattgtgcaacacttcttttcctatgctgtgcctttcctgatgatagctgtccagaagataaggcgccgctttccccttcatttgcgccgccagcttccagccgaggttgaaggcatcctgaagccccgtgttcagcccttggccgcctgcgggaaaatgaatgtgcgccgcatcaccggccacaaaaacccggcctgatcggtattgttcggcctgacgctcggcattgccgaaccgcgacatccataccggatcactcaatccgaaatcagtgccgcatatccgccgcaggtcttctttcagctcattttcggtgaccggctcttccttccgcttttgcggagcgtgcggagaaacgatgaggacgcggaaaagtccgtccgtaagagggacaatcacaaccgatccctccaggcggcacgttgaaaaaaaggaagattcgggcggatgtttcaaagcggcatcacagagcgttcctgttaagtcggcatcagtgcccgaaaaagcgatgcccgcctgtttcctgacaatgctccccgctccgtctgtacccgttgcatataagctgtgaagagtgcggatcccgctttcgtcccggaacaccgtctccactccgtcatccgtctgggtgacagccaccgcttccgccccgcggatgatgtctgcgccgagacttgatgcatactcctccaaaatccgctccgtttctgcctgaggcagcattaacgaataattctgcttcgtatccagccgagaaaaatccagccgtgtatccagcatggaaaaatggccggaagacaccttcgtccctttttccaaaaagcgttccaatatgcctctcatggcaaaaagctcaagtgtgcgcggatgcataataagcgctttggaatatggcaccgtcttcttcaatcgttcaataacagtcgttttcactccggccagcgccagttctgatgcaagcataagcccgaccggacctcccccgataatggcagcctgtgttttcatctcatcagccctctttcatattttttgttacacgggtaacaaaatcaccaaaaaataaaacgcctcctttttgtttcgcgcgtaacaattttcattatagtcttccctctgcttttttacaatcatttccgaaaaaaaaagacgccgtttacttggcgtctgattcactgatgactccgacaatgtctttatccttaatcggaccgaaatgacggctgtcgaggctgtatatgcggttgtcgccaataacaaagtattgtcccttcggtatgcttttgcgcccggtcgtttccttcagcgtataatcaccggtcacatggctcccggcggacaatgatgactttaacggttttaaaaacggttccgccacccgttttccattcacatacagctgatcctccctgtatgcgattgactcgccggggagcccgatgacacgtttgatcagcactttgcggtgcgggcctttaaacaggacaatatcgaaacggcggatcgttttgtaacgatgggaaaacttgttgaccatcagctcatttccttgtttaaaggtcggattcatgctgattccttcgactttataatcaataaaaatggcattctttaattgtatggccaaaacaacgataagcacgccggctataaaccaaaatcgttttttcaagattcctgtctccctccgtctttctcatgctgactgattctcgtctgtaaacgccgttcgatatgctttccggcataccacagcaccgcgatcaccgtaatggcgcccgccatcctgaaaggctgtgtcatgagtgcgtgaagatcatacccgataaagctgatcataaagatcatgaccattttccccatagcggctgctgatataaactgcagcgcccccacccgtgacagaccggcaacgatatgaaccgcagcggacggcgtaaaggggaagcaaagcaaaataaacagcggaccgaaaccgtgacgctcaacccagagcatcatccgccttatggtctgatgcctgcggatgaaaccgaaagctcttttctgtccgaaacggcggacggcataaaacatcagcatcgatcctgccgcagacccgagccatgacagaaaaaaaccttcccacaaaccaaatgcattcgtattcgccaccacaaatacaacgagcggcaaaaacggaagaaacgcttcaataaaaggcagtgcagccgcagccgccgggccgaaagctctatagctttggaaccattccgtcagctgttcctcagtcaaatatgataaaaattgctccaacgtttatactccttaacgagtttgtctatccttattctacacattatctccaaaaaacgaaaatgtttacgagattttccgacttgaaatatcgtgtaagcgagtataaaataagaacaaacgttctcttttttaagaaagaaggagtatttatgcctgacatccggagcggcacccgcgatctcatcgaaaaagggctgtttctgcccatggcggctgccatcctgaaccgggacctcgaagcgcttgattcgtgcccgttcaaattaaaacaaccctataaacagcttatcagctgctctttaaaattagcacaaaaggatttgagtgatgttcgaaaagagttaagaaagcgtaaaattaaaatatacgaagcggaaagagacgaagcatttacgctttatatatgcaccattaacggctatgaagaaaaacaccgttatttcaacccgagaatacgggaacaggtaaccgccttattagaatattacctgtctcttgcgaccatttaaaaagcagccgggactgcttttccttttcaactaataaatttcagactattcacactatacattcgacatgattttctttataatcgggacacgctgttttcaatgaaaaggaggaatgttatgaaactgattcatgttctcgccgccctgccctttttcggaattctcgccggcattccatttgccaaccgggtgacgccttatgttttcggaatgcctttcattctcgcgtatgtcgtcatctgggcggtgctgacttccgttctgatggccgccgtttacaaattggacaaagaaaataaggcgggtgaggcggaatgaacgcagcatttcccgtaatggccgccgtgctcctgttttgtgtatatctcggaatccgggcccgaaaaggaaaacatatggaccttgaacaatggacggtgggcggacgcggcttcggcacgatgtttgtctttttattaatggcgggagaaatatacacgacctttacattcctaggcggaagcgggtgggcttacggaaaaggaggccccgccttttatattatcgcgtacggctgccttgcctacattttgtcatattggcttctgccagccgtgtggacttacgccaaacaacacaaactgatgtcgcaatcagatttttttatttcaaaatacaacagcccgctcctcggcattctcgtatcgctcgtcggcatcgcatccctcatcccctatctcgtcctgcagctgaaagggctcggattaattgtttcagcaacgtcatacggacagattccgccctcagccgctgtctggatcggcgctgtttccatcacgatttatgtgatgatatcaggaatccacggttcagcgtggatatcagtcgttaaagatatcatgattttaggcatcgtcctgtatttaggcatttatctgcccattcattactatggcggatttacggagatgttcaaacaaattgacgccgcaaaacccggatttctcacgctgccggaaaccggacagagcgtttcctggttcagctcaacggttttgctgaccgccctcggcttttatatgtggccccatacatttgccgcttcctattcggcggagcatccgcgggtgtttcggaaaaacgcaatcatcatgcctctttatcagctcgtcctgctgtttgtcatctttaccggatttgcggcgattctgcaggtgcccggtttaaaagggacggacacggatctcgccttattaaagctgtctgtgaaaacctttgatccctggtttgtcggactgatcggatcggcgggcattctgacggcgcttgtacccggttcaatgatattaatggcctcaagcacgctgttcgccaaaaatgtgtacaaagccattctgcccggcacgactgacgaaaaagtctcacggctcgcaaaatacgccgtacccgtcatcgcgctgatatccgtatattttacgctgaaaggcggaaataccatcgtcaccttgcttttaatgggctacagccttgtcacccagcttttccccgccctcttattcagcctgccgaagcggcgtttcatcacaagccacggcgcttttgccggcataacggccggggtcggaacggtggccttcattacgctgaccgaatcaaccatcggaaccctctttccgtttcttccgcagatcgttaaggatatgaatacaggcatcatcgcactggttctgaacattgccgtcatgtttgcagtcagcgccgcagtcagaaaaaaacaaatcagcgcagccgaaaaggcggcttaaatggtaagatagcggtaagatacacgaaaggggaaaaacgcatgatcatgacaacgaccgaaaccgtcgccggaaaacagattacggaagtgaaaggcttggtgacaagcagtatcgtccagtccagacacatcggcaaagacttgcttgcaggcttaaaatctgtcgtcggcggcgaattgaaaagctatactgaaatgctggaagactccaaaaaagcggtgaaagagcggctgatcagagaggcggagcagctcggagcgaacgccatcgtcggcctgcggttcgaactgaccgcaggacagaacacatccgaattaatcggatacggaaccgccgtcaccgccgaatccatttaaaaaaacaagcctctttaaagaggcttgtttttttatttctcacatgcgatatagtctttatctcggtcaagtcttttatttgcattgtaaagcgcttttgatacatacggcttgtactttgttctgccgcccttgtttttcactttcgacgatttggccacgccgcccttatacaccttattcagcgccttgcagttttgatacgttttcacctttgttttcgcttctgccgtctgccccgctccgtatgaacatccgaacacaagaccgaaagacaaaagcacagctgccgtctttttcatctctatcctatccccctcctaagttatgcggtattgctgaacatatcatagttcaaataatctccatttacaagataaataggaaaatagttttaatttacgtccgactgtatatcttttatggaatttttcccaaaaccttttataatatgaattgatagcgcgatctgactatgatgataggaggagaaatgatgatgaaaaaagggctttttgcgggtgtgctcactacagccgttctattcggcacatgtacggcggaaattccggggttgatcagtcccaatacggcggaagcggcgtctcagctcagcaaaggaatcggcggaagggcctacctgaacagcacgggttctgtactcgtcacgaaaattcagcttccaagctcaattcaggtgtcaaatgggacagcctatatttactcaggatttaccggaggcacagaggctgatatcggacttcagtacagtgacacctatcatgtatggaaaccgatcatgaaagtcggttcaaagggacaaggccaggtcaagtatctggaaggagaaagccaattcacctatacgaaaggcttccggcccggcagcaccgtacagctgaccatctacaaaaatctgaacggcaatacccgcgccacatattggggcacgaataatgacggatacaccggccgcatcatctcagaactcgcccaaacaaatgtaggctctgtctcaaaatggaaagcgctcgccaccgtcgcggtcacatcagaggatcagcgcccttacatcaaatcaaacttctcaacagcctttacgaacatcacgattgacaataaagcagtcacacctgtgattgatacacaggattttgccaaattgacagtgtcaggcagcagcgtcagcatgtctgtcgtcaaataaagaatgttgaacgcacgatttctgtcatcgtgcgtttcgtgagggtctgccggatacgcaaatcccttatttttcggattacgtttaataaacaaactctgttacattcaaaatgtcgatttctatataacaattagaggaacctcatttgttgaggttccccgttattctccaactcacgcaccggttaacttcacatactgtcagccggctcagggctgtccaattttagttagaatatagctttaacaggtcttgtgctggaaaacgatctgcatcgttcgcctcaacaaaatatgccaactgccatttttgtgtttcgatagcttgtttgctagtgggattttcccattcagggtaaactctaattgccatttttccttttgtagcggctgttttaaggatattttgctttacaagaacttcttttggaaaaacgaattgtccaaaatgattattactggcaaaagtattgataaccaataaatcagcagctttttcatatgaaaaggcttggtttttaccatctccatctttttcccaaaaagcaacaaactgtcctatcttgttaggcgttatttttgcgactctgaatcgaactgactttgaatgcagttgaaacataccggccccatactctgagttttgagcttcttcttgaatatcatgtatcgttaagtgatttggttcataaaaaattttatttacatatgttaacgccttataaaattcattcactgcgtactccttattttttatagtacgtcatccattgcttcttgattaaaatgggctgatcatgtgtttccaataaaaaaacagccctcctcagggttgtttttttaacatttctttcattatttccgccaaaatgctgagcagtccgccttatcctgaatattgaattgaatcatgcgttcaagcagctcataatgcaccggttcagtccattgaattctgaacaaacgggaagtagcgctgtagccggcacaggcaatgtcctcggcaaaatgcgcaattccagcttcttcgggggaaacacttacatgatgctttgctgccgcaaagccgataataaaggtgccgtgatcggtaaacatcggcgtgttccacttgatctgcgcttctaagttcggaaattggtcagccgtccacgacagaatttcctccattcgcagacgatgatcagggctgtcgatacttgataaatagtctttgaaaacgtccatgtcttcctccttcatcatcacgtccgctagcgccaaaaccccggatttccagctttttccttgatgttaaattcgatgatcttcttaagcagatcatagtgcaccggatcagtccatcgaattctgaacaggcgcgaagaagcgctgtacccggcttgagcgatgtcatcggcaaaatgctccatcgtctctttttcaggtaaaatgctcaaatgattttttgccgcggcaaacataatgatataggtgccgtgatcggtaaatgtcggtttgttccacttgatctgcgcttctaagttcggaaattggccagccgtccacgacaagatttcctctgctttgagacggtgatccgggttgtcgattcctgatacatattttgcaaacacatccatgcccatctctcctaaaatgaaatatcattactctttacatcatcatagccaacagacggacacgatacaactctgcccgggcatgtaaatcgaaaaaagccctccccaaaaggagaggacccgtcccttcacatcacagctttctctaatatctctcccccagctcccgcaaaataaagtcgtagatcattcttgtccgctcttctttcggatacagcatgaattcctgccgcttcgggacatgactgcccatcctgtcctgaaaagtggttctgagataggcggttctgtaaacctgattttcaaaagaatgataggatacttccagttccatcgttttgccgtttgagaacgtgaccgctgtgtcatcaaatgccgtcggttgaaaatctttaacgtgcacatgagatatccagccgcattgaggccttgcagaagaaagtgtagggaataaaaagatgtgatttgaagggtccaccataatcggcggcttgtgagaaattttaatcgcttcatatgttcccgcttttctcccggcatagctggagccaaagtagcggcagcttctgtcgatgatgtgaatcggcttcatgctgacatacagaatgcagtctttttcaatgaccttcgaccccattttaccgtctatttcctcaggcaaaacagcgatggttgaacgatttacttcgtagctttctaagggtgcatgtgttttctggcacataatgtgcagcctccaatccttttcttgaaaatttatactaataatctatcatctgtcattggaaaacgacaggttttttttgaatatagctaaaaatcaccttttaaagatgtaatttagtcttaaattactatttaaatattgtttttctttttcgtttcacctcatttatacgatgatcattttcgttttttcgtcaatttgcaggatatgtcgatatatttccaagtattagttgtctaaagattataaaaattaattgatttttccggccgttatccatatactataaaaaaggcattggggggattctttatgaaagagaaaaagtcgtacactgagctcatgaagtcccgcaacacgcaaatagcaaacgaattcgatgtgacaatggccgatatttacattcaaatggtgcttgatgaatccttgtataaacgccggctcgccatgctgaccatgcagattaataaggcgcttgatgataaaaataaagaagcgttcctcacgctttcaaaagaatatgcagcactcaaacagagtgaataagccaatccatatggattggctttttttacattatccgtttacgatggtgccgccgttcacatggatcgtctgtcccgtgacataggaagaatcatcgcttgctaagtacaaatagctcggcgccacttcaacaggctctcccgggcgctgcatcggcacgtctgagccgaagacttccacttccttcgccgagaagctcgccgggatcagcggcgtccagatcggccccggcgccactgcgtttaccctgatgccctgagtgacaagagattgggaaagagatcttgtaaacgtgacgatcgccccttttgtcgctgaatagtcaatcaatgttttgtggcctttataggcggtaatagaggccgtattaatgattgaacttccttttttcaggtgagggagcgcggctttcgttaagtaaaacattgaaaaaatattcgtctgaaacgttctgatgagctggtggctcgtgattttctcaatccccggctgcacgtgctgctcacctgcgttgttgaccaggatgtcaatggaaggaaaggcttggcccgcctggcggatgacatcgttgcaaaaggcttcgtcgccgacatcccctgcaatcagcagacacttcgccccctctttttctacatattgcttcgtctcttcggcatcctgatgctcatcaaagtaaacgatgaccacattagcgccttccttcgcgaataaaacggatacggcgcggccgatcccgctgtctccgcccgtgatgaccgccgttttcccttcaagttttttcgccgctttcggtttgtcaaaaacggggcgcgggtccattacatattcaaagcccggctgccggttttgatgctgcggcggcaaggttttcttcttctgattagccattttgatcactcctttacattaattactatattatgagtaatttgagcatcttatacgaatttcatgtatgaacagagtcttattggaaaaattaagaatatacaacagaggaggtaaatctgaattgactactttttcaaacgaggaaccggcttcctattggaaagcaacagctgacattccttcctttcccgccctcactgaagatacggaatgtgacgttgcgattatcggcggaggaattacgggcctgacaacggcatacgaactgacgaaaagaggtttccgtgtcgctgtcattgaagcagaccggattttaaacgggacgaccgcgggaacgaccgcaaaaatcaccgcccagcatgatttcatctatgccgatcttattcagcagatcggcctgaccagcgcaaggctgtatttcgaagcccatctccgcgccatggaagacatgaagcagatcatcaaggacctttcgattgactgcagactgattgaacaagacgcatatctttacaccaatacagaatcaggcgtcaaaaaaatccgcagtgagcaggaagcttataccaagctcggtattgaacacgagcttgtgaaagaacttcccgtccccgttgattgcaggctcggtctcgccatgaagaatcaggcgcaattccatccgcttttatatggcgcggcgctcgtcaaagagatcgttaaaaacggggcgcgtatttttgaacagacggctgcgatcgacataaaaaaagaaccgcagccggaagtggtcacgaaaaacagacacggcatcaagtgcagctacattgtctgctcttcccactttcctttttatgacggaggcgggctttacgccgccagaatgtatgcgagcagatcctacgtactcgcggtaaaaccgaaacaagcgtatccggacgggatgtatctcagcatagacaagccgtccagatcactgcgatacaccgatttgaacggtgaaaaactggtgcttgtcggcggcgaaagccacaaaacaggccagggaaaagaaatgtccgagcattacgaagcgctgaaacaatttgcggaagacacaatcggagttgaaagcatcccatatcattggtctgcacaagaccttgtcaccattgataaaattccgttcatcggtcccatctcaggcgatgaagaacatattttggcggcgaccggttttaaaaaatggggtatgacaagctcagcgctcgcggcgaagcttttggctgatcatattcaaaacaaaaagaacccgttttccggcctgtttattccgtcacgcttccacgcagatccgggactgaaaaaactgatttcctataatgccgacgtggccaaacaccttatctcgggcaaacttgagaggccggacgcttcacctgagactcttcggcccggggagggaaaaagcgtaacggtaaacggcaaacgggccggcgcctataaagatgaaaaaggctgtctgcatcttgtcgatacgacatgcacccatttgggctgtgaggtcgaatggaatgacggcgaacggacgtgggactgtccttgtcacgggtcccggttcacacccgacggcggggttgccgaaggtcccgccatcaagccgctgaagcgcctcagccaagattaactaaaccattctgtacgaatggttttatttttttgcattaaaatatttttatcagattccttcattcaagttccttccataccgataaaaagaaaaagagaatatctgggggaacttatattgttatttaaaaaagaccgcaaaaaagaaacagcttatttttcggaagccgatggaaaaaaacgcatcgcgctttcaaatcaatatgcagatgtccaaaaacagctgaaaatggtcaggctcggaaacgaagaacttcatgtgcttgaagagctgcagccgttaattaaagaacatatctcaacaatcgtcgattccttttaccgaaacctggatcacgaaaaatcattaatgacgatcattaacgaccacagcacggtcgagcgcctgaaaaaaacattacggcgtcatatccatgagatgtttgccggcacgattgatgatgaattcattgaaaaaagacagcgcatcgcttccatccatttgcggatcggccttgaaccgaaatggtatatgggagcgttccaggatctgcttctgtcgatgatgaacatatatgaagcaaccattccggatttgcatgagcttttaaaagcgatcaaagcgacgacgaaaatattgaatcttgaacagcagctcgtccttgaagcattccagactgaatataactgccagcgtgacgaacaagaggaaaagaaagcccgtcttcatcaaaaaatccaggaaacatccggatcactcgctgatttgttttcagaaacgagcagagccgtgcaggagctggtcgataaatccgagggcatttccgaggcgtcaaaagccggcaccgtcacttccgtacatgtcgaagaaaaatcaatcggcgggaaaaaagagcttgaaagccagcagcagcagatgaataaaatcgacgccagccttctgcagattgaagaagaaatggacaagctgaatgacatcgcccagcagatcgaaaaaatcttcggcatcgtgacggggatcgctgagcaaacgaatctcctgtcactcaacgcttcaatagaatccgcgagagccggggagcacggcaaagggttcgccgttgtggcgacggaggtaagaaagctttcagaggatacgaaaaaaaccgtttccaccgtatcagagctcgtgaacaataccaatacacaaatcaacatcgtgtccaaacatattaaagatgtaaacggacttgtaagtgaaacgaaagaaaaaatggcgcagatcaaccgtctgtttgatgacatcgtccaaagcatgaaaacgagcaaagaccagacaggcaaaatcgacgttgatttgcaggcctttctcggcggccttcaagaagtcagccgcgcggtttcccacgttgcatcatccgttgattcacttgttatccttacagaagaataaagataaaccgaccggcctttttcataaagggccggtctttttaatgttaacttgaaatataatagagttgacatatataaagactcgctttattgtataaacatattttgataagctggaggaatacataatgaaattgacagaaatgatgcatattgccgtgtttaccgccattatgggacttttggggctgctcccgccgcttttcttatcctttacgccggttccgattacgctccagacgatcggtgtgctcttatcgggaagcatcctaaaaccgaaagcggcgtttttaagccaattgctgtttttgctgattgtggcatgcggagcgcctctcctttcaggcggcagaggcgggttcggggtttttttcgggccgagcgccggatacctcatcgcatatccgctggcggcattactgctgagcctcagcatccaaggccttcgctcagctgctgtcccccatttgtttatcagacagttcttgttcggcgtgctgtttttgtatgtcatcggcattcccgttcaggcttttatgatgcacattgatatcttaactgccgtaaagctcagcctcatctatgtgcccggagatctgcttaaagcggccgcagcctcattcgcagccgtaagaatcaggaaaactcttcaagcaagccggcttttgccgacgaaaggaagctgattttagtcatcatgattacatcatcatattcagatacagccggacaagcgccggaacagatcgcaattcaggcagaaacagaacagatcacctatcaaacttggaacaggctagttaaccaaaccgcaaactggcttggcagcctttcaggtaagccggaaaacattgcaatattactgccgaacggcatcccttttttacaacttttcgcaggggcggcgcatgccggctgcacggcggttccgttagatccccgctcggcagcggcggaactcgcggatcagctgcacatcagcaaaaccggcctcgtcatctgtgaccgccggctgagcggcagactggacggcgtcaaaacgcctgtcatcctgtgggatgaatgcaggcctttgatcgaggcggaaaaaacggaaggcgcttttatcaaaaacgccggcctgcccttttataccggattcacctcgggatcgaccggtaagccgaaagccttcacccgctctcaccgttcgtggctggagagtttttcttgtacgaaacgtgaattcggcatttcccctgatgacaaagtgctggtaccgggcacgcttcgctcgtcacactttttatacggcgccgtcagcactttgtttatcggcggaaccgtcatccttcaaagaaaattcaatccggccggaatgaaagaccggctcagacaagctgacgttctatataccgttccgacaatgacggacgccctgctctcactagaggcgtttccggatacaccgctcaaggtgatttcttccggtgcagactggcccgcttcgtctaaacaagcgctgtcagagcgctatccccatttgcggttgtacgatttttacggaacgtccgagctgagtttcgtggcgttcttatcgcctgaagacagcgcccgaaagcctgacgcggcgggccgcccgtttgaaaatgttacaatcgaaatccgccggcccggcggagaacgctgcatgccgggcgaaacggggaagatttttgtgaacagcccgatgaaattttccggatacatcaacggcgcaaaacctgatgattccggctggatgacggttgatgacatgggatatatcgatcgtgaaggctatctttatatcgaaggacgtgaaaacgggatgatcgtatcaggcggcctgaatgtattccctgaagagatagaacgtgtgctcaaccgctgtccgggcgtcagaaaatcggccgtcatcggcattcctgatgattattggggcagcatcgccgttgcggtgatcgacggagatgcaaatgtaaaggaactgaagaaacagtgccgcgagcagctggcggcatataaaataccgaaaaaatggctgttttcagaaataccggaaacagccggcggaaagatcgcccgtgccgccgtacaaacgcaggcaaaggacatgatggaatggaagctgtaattacggatgcgaaacggacaattttcgcccgggaaaacggcctgttaaaagactgtctcccagaagatttggcagctccgctgatccgccatttgagccggaacatgcccgaagacattgatgaagtcctgatcggaaacgcgacgggccgcggcgggaatctcgcccggctgtcgtccttggccgccggacttcctttgagcgtgtccggtacgaccatcgacaggcagtgcggctccggactggacgccgtgagggtcgcgtgccactttgtcaaagccggcgcggggagcaagtacatcgcgggaggagcggagagcagcagccgttcccctttctcatcccgggcgcgcttttctcctgaacacatcggcgatcctgatatgggcatagcagcagagtatacggcacaggcttacggcgtaacgagaaagatgcaggacgaatatgcccttctcagctatgaacggagcatcaaagcgcacgaagacggcttgtaccgcccggaaattcatccctgtcacggattcgccgctgacgaaaacatgctgaaaaagcggaacatggagcctctcatctcccgtgccaagcccgtctttcagtccggaggctctgtcaccgccgccaacagctgcggaatttctgacggggcggcggcagtttgtgtgatggaagaacaaaaagcgcggtctctcggtttaaagccgggattgcgttttatcggaagcgcggtaagcggcgtccatccgcattatccgtcagcagctccggtttatgccgtcaaaaaacttttgaaggaacgggacctgtcaccggatgatattgatatatacgaaatcaacgaggcgtttgccgtcaaaatatgcgttttttcacagcagcttcgagtgccgtattctaaaataaatgtccggggcggcgctctggccgtcgggcatccgtacggggcttccggggcggcgcttgtcacccggcttttttatgaagcaaaaagacgcccggatgcccgctacgcagcagcagcgatcggcagcggaggcggagtcggactggcgcttctctttgaagtgttaacgtaacggcagtataatagatgatatcgataaaaaatgatcggagtggagactttatgactgccgtttgtttagtaagacatggagagactgattggaatgcccaaaagaagcttcaaggcaaatcggatattccgttaaatgcgacgggagagcgtcaggcgaaagaaacaggagagtacttaaaggggtccgaatgggatgtcatcgtctcaagcccgatgaaacgggccagaaaaacagctgacattattaacgggtttttgaatcttcccatcgtcgtcatggaagatttcagagaacgaagctacggtgatgcggaaggaatgtctttaccggaacggtcgaagcgctacccggataaaaactacccgaacatggagaccgcagaagagctgacagacagaatgcttgccggtttagtgaaagttcaggagcaatttcctgatcaaaaagtactgatcgtcgctcacggcgcagccattcatgccctcttgtccgccatttctgacggtgataccgacatccaaaacgcaaagcttgtcaatgcgtgcctgagcaatatcgaacgaattgaaaataagtggcgcgtcaaagattacaatgtaagcagccacctatcagaatcataacaaaaaggcccgaattcagttttgggcctttttggcgagcatttttttctgcagatcatgtaatatggcgtccgcaccctcaatgctccggcgctccgtccataccgccctgtccgcgcggtaaacgtgtccgttttttacagctgtcagctgtttccagaggtgatttttttcgagttctttctcaccgtccaacagcacgatgtaatcaggatcgatatgcaaaagctgcccggacgtcattttgatagagtctgatttcccgccggaatccgtctggaccgcataggtaaaccctgcgagcgtcaaaagccgggacgtaaaaaactgatcatcctttacggaaatgctgtcatttgcagcgtcaattaataaaatcgtgccgccttctgcatccagctttcttttgatgtcattcagcttttcttcctgagccgacaattgtttctctatgatgccatctttaccgaccgccttttcgatagtaagggcagcatcaaccgcatcgtgataatccgcagcttcattttttaaagcgattgtcggagcgatctttgtcagttttcggtatatccccttgtgaaggcttgagtctgcaatgatgagatcgggctttaacgaagtgatctttttcaaatcagggtgtgacggtggtccgacggacggactgccgtcgtttcgctctgtccggttatccgccgcagccacaggctttatgccgagatcatggagggtatcaataaagccctcattcaatacggcgatgcgctgcgggtgcgcagccacatgcgccgtccccagatcgtgcctgacggcggtttcatgttcctgttctgagcatgccgttatgaagagaacggataagatcatcagcatactgaaaatttgtttcatctgttccccctctttcgtttttccgcaattatatcattgacaatataagtatcaatgatattcattatcattatttttataaaatggtttcacagcttttctccgtcaagaaagccgaagactgattcatgccggccgctttatttcattccgctttcgtttccatcagacttctgcattcaacaaaaggtgacatttatcctgtttttgccgcagcttccaaaaatggaatcaaaccgttcgacccagcaaacaagagagcgattgcggctgtgtacaaatactcatgtccttccatcggttttttccattaaaatttaaatatttcgggttcctattaaacgaaagagagatgatatacctaaatagaaataaaacaaattgaaaaaaattgggtctactaaaatattattccatgctatacaattaatccacagaataatctgtctattggttgttctgcaaatgaaaaaaaggagaggataaagagtgagaggcaaaaaggtatggatcagtttgctgtttgctttagcgttaatctttacgatggcgttcggcagcacgtctcctgcccaggcggcagggaaatcaaacggggaaaagaaatacattgtcggatttaaacagacaatgagcacgatgagcgccgctaagaaaaaagatgtcatttctgaaaaaggcgggaaagtgcaaaagcaattcaaatatgtagacgcagcttcagctacattaaatgaaaaagctgtaaaagagctgaaaaaagacccaagcgtcgcttacgttgaagaagatcacgttgcaaaagcgtacgcgcagtccgtgccttacggcgtatcacaaattaaagcccctgctctgcactctcaaggcttcaccggatcaaatgtgaaagtagcggttatcgacagcggtatcgattcttctcatcctgatttaaaagtagcaggcggagccagcatggttccttctgaaacaaatcctttccaagactacaactctcacggaactcacgttgccggtacagttgcggctcttaataactcagtcggtgtattaggcgttgcgccaagcgcatctctttacgctgtaaaagttctcggcgctgacggttccggccagtacagctggatcattaacggaattgagtgggcgatcgcaaacaatatggacgttattaacatgagcctcggcggaccttctggttctgcagcgttaaaagcggcagttgacaaagccgttgcttccggcgtcgtagtcgttgcggcagccggtaacgaaggcacttccggcggctcaagcacagtgggctaccctggtaaatacccttctgtcattgcggtaggcgctgttaacagcagcaaccaaagagcatctttctcaagcgtaggttctgagcttgatgtcatggcaccaggcgtctctatccaaagcacgcttcctggaaacaaatacggcgcgtacaatggtacgtcaatggcatctccgcacgttgccggagcggctgctttgattctttctaagcacccgaactggacaaacactcaagtccgcagcagtttagaaaacaccactacaaaacttggtgatgctttctactacggaaaagggctgatcaacgtacaggcggcagctcagtaaaacataaaaaaaccggcgtcggccatggccccgccggtttttttattatttttcttcctcagcatgttcaatccgctccatgatcgacgggtggctccctctgaaaattttgacgagaaacggcgggttgacccggctcagtcccgtatcggccaaatcctgaaacgtctcaatcgccgcttcccggttgccggtcagctcgatgccgtaacggtcggcggcgttttcttgataccgggagacggcattcgtaatcggatcagaagcaaaactgagaacggatatgagcagcaataacagcgggagggcggccagatcttcaggcccctttatatgaagcattcggccgaagaatttggacagccgcttataaagcttgtcaatgatatagaacccggctaatgacagcaggagatacccggccagtccgatgtacacgtgcttcatcacatagtgccccatctcatgccccataatgaacaaaatttcccgatccttcagtttgttaagcgtcgtatcccacaaaacgatccgcttattcgaaccgattcccgtcacatacgcattcagcgcattcgttttctccgacatatttacttcataaacatggctggccggaatatcagccttgtcggcaagcgacaagattttgctttccagctccttgtctttcagcggatagaaatcattgtataaaggatcaatcacgaccggctgcagaaaaaacaaaaacagggtaaacggcacagtaagacaccaagcgtaaaaccaccatttttttgtatgctttgtgatcagccagtaaaacacaagcacacacacggcaaacagcggaaaactgatccagaaatcaatgacatggtctcttatccagcttgctgttgtctgcgtcgaaatatgatacgcaagcgaaacccgatatccgatccactcaagcggaagcgaagccgccgtaacgatgagtgaaatcacaaatacgaagcttccgatttgcagcacccgaaagcgcaccgctgcttccagccaatgctttatttttttggcaagccccgtaatgagcagcagaaaaaataaaaaccaatctaacggcgcaccgatgaaaaataaaaaatcctttacatttgaaaagttttcagcggcttccaggcggcccgggtccataaacgaggacggatcggctttcgttccctttacggcctccgggacggcggagtcgcctgtcataaagaaataccaatagaaaaaaaggccgtacagcacataggcaagtcccgctgccgctatccatttgcgcatggaagtctccctccttagccttatgacttactcctattgtaagcataaatgcaaataaatagaaccaagcctccgaaacggatgttaatcttttcacaacagaaaagaatggaacaacaggaagcgggaaagactaaaagacggagtgatgaatatgaaaaaaataatcgcgtttattgtagtaatcgcccttttggttattgctttcttctatgtatacagccggaccggcgatgtgtttccatcaagcaacgcagatctgattattctgtctgagcacggaaaaaaagagatcaaaattaaagacaggcagaatgtaaaagatatgctcgatatcttgaaccaaggaaaacaagtcaaactgaccaaaagcgtatctcccgattacgacggaacggtcaaataccatgaagaccgtttcgattcattcagcatgtggctcgaaggcggcaattatatgctgtacaagtataaaaacacgtattacaaactgacccggcatgatacgaagcttgtgcaaagcatcattaaggaagaatcgcagagctgaccggatcagcatgtaaaagcgaagcccccggcttcgcttttcgtccgtcatttcggaagcatgtcccggaccgcccgcctcagcagcttcccggtcgcgttcttcggaatctcatcaagaaaaaccacttccgccggccgtttatattttgccaaatgtgtttcacagtaatcaaaaaccgcctgctctgtcagctcaccgtcccccggcactatataagcatgcaccgcttcccccgttttggcgtcaggaacgccgatgaccacggcttctttaatgccctcatggctgtagagcacttcttctacttcgcgcggatagacgttgtatccgccgacgagaatcatatctttttttctgtcgacgatataaaaataaccgtcttcatcgcgcttcgccaaatcacccgtgtacagccagccgtctttcagcgcgtgctccgtctcctcgggcatcttgtaatagcctttcatcacattcggccctttcacgatcaattctcccacttgatggtcgggcaattcgcgtccgagcgtatcgacgactttattttcgacatgtaaaatattcgtcccgatcgagccgggctttctcccccggtcaaacggattaaaacaagtaaccggagacgcttcagaaagtccgtacccctccagaatggtgacgtcaaaggtttgttcaaacgtctgcaacagagcgaccggcatagaggccccgcctgaaatgcacagtctgacggacgcaaaatcctccgccttgccgtgctcgtattgatacagatagttatacatcgtcggaacgccggcaaaaatggttgcctgacggcttttaatcagtttaaacacagaagccgggctgaattgcggctcgattaagacacacgctccgctcatcagaggcgcattcatacaaacggttaaacaaaaaacgtgaaacatcggcaatgccgccacaattttgtctttctcattcattcctaagtatccggcgacatcatttgcattggagaaaagattctgatgggtgagcatggcgcctttcggttttccggtcgtccctgaggtgtataaaatgacggcagtatcatctttggacaatatcggataagttctgctgcgctccgccgggcagagcatttttgcaaacgttgtcatttttaagcgcaattgagggtcttctgtcgatggagcgttctctgctgtctggctgataatgatatgctccagcagcggcagcgagccgtgcaggctttcaaatacgggaattaaaaggtcgatgccggcgatcgctttgacatcgccgtttttcagcatgtatgcgatttctgaaggtgtatatgccggatttacaggtatgacgacaattcccgcttttaacgcaccgaaaaacgcaataacaaaatcaggcgtatttccgagcagcagcgcgagatgatccccttttttcagtcccctgtcctccaagccgtttgcaaatgctttgattttacctgccagctcctcatacgtcatgtactgatcttgaaacagacaagctggtttttccggtttctgcgatgccgtttcttccaatttggaaaccagattcattttcccacccctttaaaaattgtaatgaatgaatagtcattcatttatccggaataaacgttcacttttattatagaaaaatatagaaaaacactcaagggcaaaaagccccgagtgccgtaaaaccggaaactataattgtttcagcgcttcactgaccggcgtgctgcccgctgtcagatcgaatgctttttcatacgtattcggttcatcaagggatgcgataacggtcttggcgacatcgtctcttgaaatggagcctctttctaaatcggctgcggctttgatatttcccgtgccgggatcatttaataacccgcccggccggataatcgtatacgtcagaccgctcgcttcaagaattttatccgcataatgctttgcggcgtaatacggcttcagcgcttcattccaattgccgcggttatgagcctgaagggcgcttaccataatgaaccgcttgatgccggctatctttgccgcttctatcgctttcgcggctccgtcaagatcaatcaaaagcgtcttatcgtatccggtgcttcctcctgatccggcggtaaacacaatcgcgtcacagccttcagcggctttcgcgatgtcttccgggcttccttccaaatctgcaagaacggcttctgttcccgcggcttgaagcgcttctttctgctcttgtttccggaccatcgcccgcagcgtatgcgtgccgtctttttgaaacatcccggtcagacgctgtccgatctgtccgtttgctccgatgagaaataccttcatcatgatccctccccattcattatggttctatcatttcacaaaaacgggcgctgattcaaatcatgcgttcggcaaatgttctaataaatcagctcgaggaaatcttccagctctattttgccgaaatactgtttcagatcgattccggccagcgcctccctgatagcggttcggtcatactgttttccgatcagcgcctgttcgacttcactcacatctttcgcaccgaagaaatcaccgaaaattttgcagtcctgaatgattccttttttcacttcaagacgcagatcaatcgatccgaccggataacgtttcgaatgctgaaggttaaatgcgggcgacctgccgaaattccagtcccagttttgatagcgctcttcggaaatcttccggatcgctttccagtcttcatcggtcagtttatattccggcacttcggaaagatcatttgtattaaaaatatggtgaagcaggtgctttttgaattcatccgccgtcattttgtcatcaagaaactcgctgatgttggcgacacggcttctgatcgacttaatgccttttgattcgattttgtcttttttcactttcaaggctgacacaacatgatcaatggcggaatccagcattaatgttccgtggctgaaaatacgccctttcgtcgaaaattgagcgttgccggaaatttttctgccgtccgcgacgatgtcgtttcggccgcttaattcagcttccacaccgagctggcgcagcgcctgaataacgggttcggtgaattttttaaaattgtgaaagctgtcgccgtcatccttcgtgataaaactgaaattcagattcccgaggtcatggtaaaccgcgccgcctcctgacagcctgcggacgacgatgattccgttatcttctacgtatttcgtattgatttcttctattgtgttttggttcttcccaatgataatcgacggctgattgacataaaacagcaggtatgtctgttcagggtcgagatgcttcacgcaatattcctcgatcgcgaggttgatcctcgggtcggttatgttttggttgtcgataaataacatggtgctcctcctttatttctcccacttcaatccggaagcggcgattgtcacttcgcccccgaacacggataccgcttcttctttcagcttccggtgctcgccgaaatgaggcagatgcgtgagaatcagctcccccgctccggcctccttcgcgatacgtccggcttccaaactgttcatatggccggctgacgtgccgtcctggtctgcgtaaaaattgcactcgcagatcagcagatcggcattttccgcaaacgggataaacgcgtcctggtagcttgaatcagccgtatacacaacagaagctgaaccgtcagtaatccgcatcgcataacaagtgaccggatgcactgttttcagaaaggtaatggtgaacggacctagagaaagcgggcggtccggctgataggccactccctttgtatgcgttttatatgtaaggcgctcaaactgttctatatcagcatcatgcccgtaaatcggcagtgcatgcgtcccttttccgagaaaggagccgacctgtttggcaaattgaagcggcccgatatcagcgatatgatcatggtgataatgggacaaaatgacggcatcaagctcttctgccggaacataggcaaacagctttgataatacggcgcttccgcaatcgacgagcagagaataaccgccggactgaaacagatagcctgaagttgcttcgtttgcggccggaaacccgccgcagcatccaataactgtaactttcatataatcctccgaatgtttatgataaaaagatcctttcctccaatatacctatttttcgtacaaattgcatgttttaaacattgtgtcaaaacagccgttgattttccaaaactgttataatacaatgtagagacaaaacaatgaaagagggatgggtatgttggaaaagatgtcggattttttcagaaatttacccggtaagaaatgcgaagaatgcggaaatgagattgttgagcagtatgagtgtcacattaatctgtgcaatgactgcttgaaaattaaggatatgtgacaatagggcgccgcacaattctaagttgtgcggcgcccgttttttcggccgtcatcatactttctgaatagggcgttattcaccattattagcaattatctgtacgttttaaaagattcagtattttcaatctatatttttctatagacggattgttttcttttctattataatttgttctaatagctatctttttagatacttattgcacttttttcttcgggaggtaatctatgaaaaaattacgctttggactagcgacgcaaattttcgtcggactcatactaggggttgtagtcggtgtcatctggtacggcaatcccgccattccaacatatttacagcctatcggcgatttgtttttacgcttaatcaaaatgatagtgattccaattgtcgtctccagcttaatcatcggcgttgccggcgcgggaagcggaaaacaagtcggaaaattaggcttcaaaacgattttgtattttgagatcattaccacttttgccattattctcgggctggctttggcgaatctgtttcatccgggaacaggcgttaatatacatgaagctcaaaagacagatatcagtcaatatgttgaaacagaaaaagaacaaaataacaaatctatcgcagacacattcctgcatatcgtaccgacaaacttcttccaatcattagccgaaggagatctgcttgccatcatctgctttaccgtgctgtttgcactcggcatctcggcaatcggtgaaaaaggaaagcctgtcttggccttctttgaaggtgtttctcatgcgatgttccatgttgtaaacctcgtcatgaaagttgcgccgtttggtgtttttgcgttgattggtgttaccgtttccaaatttgggctcagttccctgctttcactcggtaaactggtcggtttagtatatgtagctttggctttctttctcattgttgtattcggaatcgtcggaaagcttgccggagtaaacattttcaaattcctcgcctatatgaaggatgaaattttattggcgttcagtacgtcaagctccgaaaccgtactcccccgcgttatggaaaaaatggagaaaatcggctgtccgaaaggtattgtttcctttgttgtgccgatcggatatacctttaacttagacggatctgtgctgtaccaatcaatcgccgctttattcctcgctcaggtataccacattgacttgtccatttggcagcagattacccttgtgcttgtcttgatggtcacttccaaaggaatggctgccgtgcccgggacttctttcgtcgtcctgcttgcgacattaggcgcattcaacattcctgcagaaggccttgcattcatcgccggtgttgaccggattatggacatggcccgtacggtcgtcaatctgaccggaaacgcgctggcatccgttgtgatgtcaaaatgggaaggccagtatgatcccgttaaaggcgcgaaggtcatgagcctcgccaaaacagaacaaaacacaaccatctcaggttaaaatgaaaaccctgcacggaatgatttccgcgcagggttttttatgccatcggcgataaaacgtaccggtgcaaaagcttcgccgtattaagaagcgataattcatgcgtgcgttcaaaagcgtgtgaagcgtcaattcccgggccgatcagcccatggacgatgtcatggcccgaacggatggctgctgaggcatcagaaccgtaatacggataaatatcaagctgataatcaatgccatagcgctccgcaagcccggccagatgttttctgagctgataatggtacgggccgctcgcatccttcacgcaaatggagacggtatattcatccgtagactggccgtcgccgatcgcccccatatcaacagccaagtattcaacggtctcaggaggaatgttggaattgccgccgtagccgatttcttcattattagaaatcagaaaatgcgtcgtatacggaagttcgattttctcttccgtgatgcagcggattaaattcaagagcagagccacgctcgctttgtcatcaagatgccgggacttaataaagccgctcggcgtaatctgcacgcgcgggtcaaatgagatgaaatcgccgaccctgatgccgagatcggacgtctcttccttcgtccggacaggctcatcaagacggacttccatattctcctgattccgctctgccttgccggcgtccttgtagacgtgcactgaagtctgatgcattaagatggtgcctgtataggttttgccggaagaagtttggatctcgcaatattccccttcaatcgagtgatatcggaagccgccgatcaagtcaatcttcagccggccgtccgcctttatctcctttaccatcgcgccgagcgtatcgacatgcgccgtcagcaatctgtgtttcttgtcatcacggccgggaattgtgacaaaaagaccgcctttgcggtttctgtaagaggagacgccccattcttttaaaagactttctgtataggcgataacctcgtatgtattgcccgtcggactcggaattgacaccaattctttaatcagttccatcgtatgtttcatatttgccacaggtcattcctcctatcaattttattcttcttaaaatatactcttttgatccataacccgtccaatcttttccttctcttttttcatagaatgaagggagcatgagcataggagggaaatgtatgatcagccgtaaaccgcacaagcggaaaagatttcataatgattggtttgaggattggtttgaggatgattggtctggtgcagccttctggggctgtaaaaaagaagaagatcactgtaaaaagaaaaaagaagacccttgtaaaaagaagaaagacaaaaagaagaaagataaaaagaagcatcatcattcatgccgccgctgctgccgtcattggtaatcgttcacacaagcccgttttacaaatagatatctcatgctccccaaacagcggatgctgcttgggtttttttattaaaattagtaccaagtaataatatcaggtgttataatctgatataaaggagtgattttttcatgtcaaaatctaaaattacagcaatcggtacatatgctccggcacgccgattaacaaacgcggatttggagcgcatcgtcgatacatctgatgaatggatcgtccagcgcaccggtatgaaggaaagacgcattgccggcgaacatgaattcacatcggatttgtgtgtggaagcggtgaaaaaccttgcagaacattacagcggaactcttgatgatgtcgatatgatccttgtcgccacaacgacggcggactatgcgtttccaagcaccgcggcacgcgtgcaggcttacttcggctggccgcacacgggggcgcttgatattaacgccacatgcgccggactcacttacggccttcagctcgcagacgcattaattaccgccggttcccatcaaaaagtgattgtcattgccggtgaaacattatcaaaggtaacggattatactgaccggacgacctgcgttcttttcggagacgctgcaggcgccctattggtggaacgcgatgaatcagcgccgggctttttggcagccgtgcaaggaacagcgggaggaagcgcggacgtgctgtatcgcacgggactgagcacagaattaaacggcgagccgcttaaaggcggaggaaacatggtgcaaaacgggcgcgaagtatataaatgggcggccagaaccgtgcctgaggaatgcaatgcccttttagaaaaagccggcttttcaaaagacgatctggattggttcgttcctcacagcgccaacatgcggatgatcgaatccatctgcgaaaagctgcccttcccgcttgaacggacgttgacaagcgttgaatattacggcaacacttcatcggtttctattattctcgctttggatgaagctgtgaaagcaaaaaaactgtcggaaggccagacactggtattattcgggttcggcggaggattgacatataccggactgttggtgagatggggattttaatagcacgacgatcgaaatctaaaaaaaagaggccctgagcatctgctcagagcctctttttcttatgctgttatttcttcttccgttttgtgttcttttttgctttgcaccgtaaaatacacgatggtcagcgcgatcatgacaacggcgatgcccaacagaatggatgcctgctgccacatgtagccgtagtcgccatttgaaatgacggcacggaacccgttgatgctgtaagtcatcggcagtgccccgtgaatcacttgatagaatcccggcaggagttcaagcgggaaggttcctccgcttgccccgagctggagcaccagaatgatgacagcgataaagcgtcccggattccccatcgttgtcgccaataattggatcatcgacaggaacgcgatgctggtaatcatcgtaaagagatagaatctccacgtgctttccacatcaagcccgattccttttaacagaaccgtggcgacaataacggattgaatcagtccgacaagcagaataacactgaatttgctgaggaaccattcaaaaccgtttctcggacgcccccctgaagcttcactcagagggaatacgaccgtcagcatcaatccgccgacatacaagcccatagagagaatataaggcgtcagtccggtaccgtagttaggcacggaatgaatcgcgttatcgtccgtttttaccggatcggcaaacatgctgtacgttttgtcatctgtcttaatgtccccggtttgatcagccgcatctttcagctggctggacaattgtccggtgccgtctaaaagtttgcttaaaccggtgccgagagacgcttgaccctgctcaattttggacgagccgtcatggattttgttttgcgcgtccagcagtttcgttaagccgcctgatacttggccgctccctgacactaacgcttctgatcctgatttgagctgtccgaacttgctgttgtattcgccgatgccggctgtcagtttgttttggctttcaaaaacggtctgcgctccgctgtataatttatcagttcccgctgtcagctggttaatcgcgtcttgtaccgccgctgcgccgttatacagtttcgatgtggattgaggcagtgctttcagctgatcagccttcgcttttacatctttgagcgcgctttttatgactgacatatccggaagctgaatatctcctccggacggaagctggctgacgatattgtctaaatccggaaggtcagccttcggaagcttctcattcagaagctgaacaagtttcgctttttgctcatccgttaagaaatcactgtccttaatcacctttttgaccgcgtcatcccgggcatccaggctgtttttcagatcagaaagcttcttcttaaactgctgcaggtccttttcagtctgttcgagctgcccaaccgcgttttcaatgtctgacaggttgactgaattgatcgcatcttcaaatgccgccgctttttgcgacacttcctgcgccttgctgtttaacgcgcttaatccattcgttaaatccggaagcttttgctggagctgcttttgtgcgtcaaggcttgttttcagcccgctggccacttggcctcctcctgaagcaatctgtcctgatttatcttgaatttcggcgcttgcgctctgaagttttgcgatagagctgtcaagcgtttgaattccgcttgtcactttcgccgcgccgtctgcaagctgctgtgttttatcgccgatggtggcggtgctttcagtaagcttcgctaaattttccttcagcttggcgctgccgtctttcgcgtttttcgtgccgtcgtctattttcttggctccgctgctggctttgccgagccctttggcaatatctttaaagttatcaaaaatgacttttgcgtattgctctgtcacttctttcgacacggaggctttcagtttgtcgatcgccttttccccgattgtcgcgccgacatagtttgatccggcattcgtatgatatttcagatccagcttcttcggatttttatccattaccgtgctggcgtttttagaaaaatcttcaggaatctcgaccaataaataatatttagcatttaataagtcctttaacgattgatcaagatcgcttgaaaaatgccaatcaaaattatcatttttctttaactctttcacaagatcgtcaccgatctgaagatgtttcccttcgtagtccgcccctttatcctggttgacaacgacaaccggcagctgatccaccgtgccgtacgggtcccagtacgccttcaaaaacactccgctgtagatcagcggaacgaataatatggcaatgatggggattaacagtttcttgttcgttacaatgtctttccactggctttttattgtattcaaccctgttgcctccttccgcaaactgactcatttgacaaaacggtcacggcacctaaaaagtgaaggatcatctattatttagataatccttgaccaacatacatttccagcaattcagcgatcgtctctttttcaagaggcggatggtttttttcccagtcaaatatcagcgcgatgtagagcttgagcatcacaaaagcggtcagttccggatcacacggtttaatgcttccgttttcaatggctgtttctatcttttctttaatgtatgacagaatggcccgctccattttcgcaatgacatcctgaacggctattgtaccaatctcggcgttctcctgaaaaattttaatagtcagctggtgtgtttttctgaattccaaaatcgcgacaagcgcccggtggacattttcgtgaaatgaaagctccggtttcatcgcttcgtctgcgtgttccttcatttctcttaaaatagtggtgaaaatatcatcaaacagttcttctttgtttttgaaaaacgtgtagatggttcccttccccacatttgcaagctttgccaccagatccattgtcgttgctttgtagccgaattgtgtaaaagacttcgttgccgcttccagaatgagctttttccgatcgacggacatgtttcccacctcgttaaattgaccgtttgaacgttttagtcattttgtacataagataacttatcacagtcacaaagaagattcaaatgttttctctctttattggtgttccctttacagaacgggaacatgcaaaaaaacctccgttttacgataacggaggctggtacgtttcaaataaataagccagtgaatcgtatacggcggcttttccttggtcgatacagtcggggatgcccaccccttcgaaagacgcgcccgtcgcgtatacgcccggataggaagctttcagcgcatctctgaactctttgatgcgctccttatggccgacatggtattgcggcatgctttcgttccagcgggtcacacaggtcatttccggttcgccatttattttcattacttttttcaaatcttccattacgattttaatgatctcgttatctgaaagatctacgatggattcatccccggcctttccgacgtacgccctgagaagcgttttgccctccggcgccgcgtgcggccattttttattcgtccatgtgcaggccgtgatggagaagtcgctgtttcttgagataacgaatcccgtaccttcatgctccatcttgacggctccctcaggaaaacctaaagcgacgttggcaacggacgtagaatgcatgtctttaagacatgaaaccgccggcagatcagaaagcattttcgccgcggctttatgcggggctgttactatgcatccttccgcatagagcactttgccgttatcaagcgtcacagaatatcctttctcctcgcggccgatatgggtgactttcgttcctttcatcacctttgtcagcgtaagctgcttttccagctcctccaccaacgtttgaagccctgtcgtcagcgttaaaaactggccctgctttttggctgtcagctgctgtcccgaaggctgcggacgcgattttttcatgccgagaatcaggcttctgtgcttctgctcagtctgatagaattgcggaaacgtggacatgaggctcagcttatcaatatctccggcataaatccctgataatagcggttctattaaattctcaacgacttcgtcaccgacgcgtctgcggaaaaattcacccagagactgatcttccttcggtttgctcgcaggcaggacaaagtcaagcgccgcccgcgcctttccgggaacagaaaataaaccggtggagatgaacggagcgattttggtcggaatgcccataaccgcgcccttcggcatcggatggagcgtctcgttgacgagcacgtaagactggccggtcgcattgttgacgagcagatgctcaagccccaaatccttgacgagctgcggcgcgctttttttcctttccaaaaaagaatccggcccccgctcaatgatgtagccgtctttatgctgcgtctgaattttgccgcccgctctcgggcccgcttcaatcagggtgacctcaagcggcagctgtttttccttgatttctttttccatgtagaaggcggcggctaatcccgttatgccgccgccgatgatgaccagatgttttttatcgccactcatttttatcgccttctttaccgtttaattctacttgtccagctctttcagcacgaccgctgcaagcgcgtcgataaattcaggctgtgcgttcggcatagccggacgatagtagcttgcgccgacttcttcggtcacagctttgcattcataatcattatcgtaaagcacctctaaatgatcggcaacgaagcctgcgggcacgtatacaaatgctttataaggatgcttttggtacagctcgcgcgtgagatcctgcacatccggcccgagccacggatcaggggtgttcccttcgctttgccagccgactgcgtaatcggtaattccggcgccttcggcaatcagttttgcggattcctccagctggtcaggatacggatcgccgtattctttaattttttcaggaaggctgtgcgctgagacgatcagcatcgcgtcatcccgttcttctttcggcattgattcatatgttttcttcacctggccgacccaataatcaacgaatttcggttcatcataccagctttcaacagacttgatggtcaagccgccgagcttctccgcttcttctttcgcgcgtttgttgtatgactggacgctgaatgttgaaaaatgaggggcgagcacaaggctgacagcttctgtaatgccgtctttatgcatgtccgccaccgcgtcttcaataaacggttcaatatgttttaatccgatgtacactttgaatgttacgtcatcctggatttcatttaaacgctgtgcgagcttctccgcctgctcctgcgtaatttttgcaagcggcgaaatgcctccgatcgcttcatatctgtcttttaaatcttgaagcatatgaggctccggctttcttccgcgtctgatatgcgtataataacgttctatgtcctcttctttgtaaggcgttccgtaagccatgacaagaagtcccattttctttttgctgctcattttgttacacacctcttttgatggtctgtccaccttgattttgacaggaaaatctacttataaccaacgatctgctcaggaagattgttccgtttttttggccgcggagtattcatgtacaaacgccgtcagctttttcagcgtttccggattgacatctgggaatacaccgtgccctaaattgaaaataaacccgtccgttttcatgccttgatcaagtattgctttcgcttttttctcgatgacttcccaaggcgcaagaagaagcgacggatcaagattgccctgaaccgtttttgtaatgccttgttttctggcgtcatctatgccgagtctccagtcaagaccgacgacatcaagaggaaggtcatgccaatccccggccaggtggcttgcgcctacgccgaacatgatcagcggaacttgttctgctgaaagctcccggaaaattctgtccatcaccggttttataaactgccggtaatcttcgcggttcagcgcgccgacccatgaatcaaaaatctgaatggcttttgcgccggcgttaatctgcgctttcgcataaacgataatcatgtccgcgagcttgtccatcagcatttgccacgcttgcggcatactgtgcataaacgcttttgttttgttgtaatttttagaaggcccgccttcaatcatataactggccagcgtaaaaggcgctcccgaaaaaccgatgagcggaacattcagctgttcgtttacgagtaatcggatcgtttccagcacgtaaggaacatcctgttcgggattcagttcgccgagcttttcaatatccgcagcagagcgcaccggctgatcgatcaccgggccgattccgttttttatttcaacatccactccgatataaggaagcggcgtcataatgtctttatataaaatggcagcgtccactccgtactgctcgaccgggagcctcgtcacatacgcgcacagctcgggctgatgcgtaatttcgactaagccgtacttttccttcagcttgcggtattccggctgagacctccccgcctgtctcatgtaccagacagggacgtgatttgttttttctccccgtgccgcttttaaaaacgtatcattaaacgcttctcgtttactcatctgaatttccacctttcctcctgcaaccatacgttcgtgttcttcgcccattacactataccttgttttttcaaaagcgtatagaattgaggcttaatgttcaaaaaatcgccgaattcatgattaagaagaaaaaagcttcggctgaacgtattccgttccctctccttcttgatccgtctgtgaattatatggaacgactttgtatgaagcccctgaaaacagattggcatacggtatgtcaaagctgccttttcctttcaccgaatccagaagtttgtcttttccgtctttcttctcatatattcggtaaacaacccgatcatccttttgaatatcccattttaattgaaccgtaatcagtcccatcgccttaaatgtataacgggccgacagggactttaccgcctccagctcaatcgggctgcccagttccttcacattttcaggctttttgaatgtccggccgttttcccccgcttttgtgacgatatctttaaagagtctgaccgggtattggcttccgcctttcaggtaatgggttttatccgttttgtcatagcccatccagacggctcccgtcagtccgggagtgtatcccgcaaaccaggcgtcctttgtcgcgccggggacgccgggaaatgtggtcgtgccggttttccccgccaggtcaccttgatagctgccttgtgaagcggttccttcttttacgacctgctgaagcattctcgtcatattccatgccgtctgtccgctgaagacgcgcgttttgccgtttttaggtctggacaacgtttctccgtcttcgtccgtgatgttctctataaaaaatggcttcgtatacattccgtttgccgcaaaggtatgataagctccggcaagctgaagcggagtaacgccttcagacagaccgcccagcgcaatcgcgagtccgttgtcagaaatgttcatgccgtttttctcaagatacgattttcccgtatctacgccgatctgcttcaatgtccagacagcgggcgcatttatgctgtaagtgatcgcatcctgcatcgtcacttcccccttgtactgtccgtcataatttttcggttcatacccgtcgtaggacgtcagtttgtcttggagaagcgaatacggtttgaacttgtcttcctgcatggcgggcccgtatacggcaatcggcttaaacgttgagcccggctgccgcttcgccgtaaccctgttgtatccttttgtcacgtagtcgcggccgccgaccgccgcgcgcacgcctccggttttattatcaataaagacggcgcttccctctgccgcctgatccgtccccggaaaatagccgctttccttcatgagggtgtatgccgttttctgcagcttggaatcaagtgacgtccggatcgtataaccgccttgaagcagctgttcacctgacatcgaataacggtcttccgcctccttgatgacaagatcaatataactgtcaaaccaaggcgtttctgatgttttcttgacattaagccccaatgtccggccctgggctctgacggcttccttggcgctgatatagccttggtcgttcatcattgcaagaatcgtatcgcggcgttctttatttttatccggatgctgaatcggcgaataaagagatggcgccttcggaatcgctgccagaacggctccttccgcaacggttaaatcttttacttctttattaaagtagtagtgggacgcggcttgaatgccgtaaacgccatggccgaaataaagctggttcaggtacatttcaagcagcttgtccttgctgtaatcacgctcaagattgatggcgataatgacttccttcgtcttgcgcaaaaatgttttatcatgagtcagaaaaatgtttttcgccagctgctgggtgatcgtgctgccgccctccaccttgccgcctgctaaaacatcccggaacaccgcccggccgacagacttcacatcaatgccgtgatgttcgtaaaaccgtttatcttcaacggcgataaaggcatctctcacatcttccggaacctgctgaatggataccggctcgcgattttccgtatagaggctcgcgatttcatcaccgttttgatcgacgatttttgaagatgcgtgcagtattaatttcttttcatcgatgacataatggccgagaaatataatgataatgtatccgattaacgcgagaaaagcggttgccgccgcaattacagccggaataaagaatctttttttctttttcagcataagtcacctcgcctttcttaacttgtagtatgggaaatattgtttcgaattatgtcagaatgagtcgccaatagaaacttataccactcttttgatatactagcaagcaggaggtggctgatatgaaggtttatattacatacgggacagccgattttttaaagacgattgcaaagaaacacccgagtgagaatatggtgctgatgcaagggggggataatgcggttttaattcatgaaacaaatggagaaaccgtttttcaggcgccccattcctatgaaagcatcgacagcgtcggggaaatcaaaaatccgggctacgccgtcctcaacaacatcgccgttacccaggaaggccgtccgctgtttgaaaaccggtttaaaaaccgcgccggcaaagtggaaaatgaacccggttttgaagccatccgcgtattaagaccgctcgaaggcgatacgtatgtcattttgaccctgtgggaagaggaaaaagcctttcagggctggcagcagtcaaactcttatcaggaagctcataaaaaacgcggaacatctgcaggcatcgacacgacgtctattttctcccgcccgtcttatgtaaccgcttattacgcaatagactgaaaaccgccggagattctccggcttttttgatgtcccgattttacgcatccttctttgcaccttccgcccgcctatgaataatctgtagcaatcctatttataaacggagtggttcaattggggatcggcgtctactcggtacatctgctttatgttgcttttatcgcggccattatcgtttttatgctcctcaggaaagatacaacctttatttcactcgccggcatttttgtgattgcgctatggacgacgcattcattctccgcttcggtcagcagtctgtttcacagcttcacgtatgcagccggagaattgctgccgacgatttttatcatttgttttatcgtggcgatgagcggccttttgaccgaaaccggtattaatgaagcgatgatttctccgtttgcaaagctgatgaaagggccggctgtcgcgtattgggttatcggctgtctgatgtttgccatctctctttttttctggccgtccccaggggtggcgctgatcggcgctgtgctgcttcccgcagcgatccgggcgggcctttctccgatcgccgcggctatggcgatgaacctgttcggccacggattcgctttatcgggggattacgtcattcaggcggccccgaaattaacggccgatgccgcgggcattcccgtgagcgatgtcatgcaggcaagtattccgctcgttttgatcatggggttaacgacgacaatcaccgctttcttcctcatcatgcgggatcgaaaaaaaacgaaggcccccctctccttggacagctccggttctttggacacaagtatgtatctgccgaaaaacctcagggtgatcctggcggttttcattccgcttgtttttctcgccgatattatctgcatgatcgtataccgcctgcaaggaaacgatgcgacggcactcgtcggaggaaccgcgatcggcattctcctgatcattcatttcattgtatataaagagcggcatttagaaaagatcaccgagtattttatcggcggttttcaattcggctttaaagtattcggccccgtcattccgattgcggccttcttttatctcggtgacgcggggtttaaaagtattttgaacaccccgctgccgaaaggatctgcggggatcgtcaatgacctcggattggccctgtcccattcttttccgatgtccggagaattcgccggcatcgccctggccgcagtcggtgccattaccgggctcgacgggtcagggttttccggtatatctcttgcaggctcgatggcaaagctgttttccgccgcgcttcatacggacccggccgttttaacggcgctgggccagatttcagcgatctgggtcgggggcggaacattggtcccttgggcactgatccccgctgcggctatttgtaaagttgacccgtttgagcttgccaggaaaaactttatcccggttgcggccgggctagtcgtcacaacgatcgccgccatcatcattctcccgtagcaaaaggattgaaatcttctgacattttctatacaatcatgggaaaagcagacgagggggacatcgcttttgacgttaacgacacttcaaaaaagcttaaacgctcagcttgacgggctgtatgaggaaatggttgaaatcaggcgtcaccttcacatgaatcccgagccatcctttaaggagaaaaaaacgccggcgttcatcgcctcattttatgaaaagctcggcgttcccatccggacgaatgtcgggggcaacggtgtcacagcctatattgaagggagtgaaccgggaccggtcgtggcactcagagctgattttgacgctttgccgatacaggatgaaaaagatgtgccctatgcttcacaaattcccggcgtcatgcacgcctgcgggcacgacggccatacggcggctttgctagcggtcggaaaagtgctgtaccgcaaccgggaaaaactgaaagggtcatttgtgatgatccatcagcacgccgaagaattatctcccggcggagcaaaagcaatgattgaggatggctgcctcgagcatgtcgatgccattttcggcactcacctttgggcgactgaacccgtcgggacggtcttatgccgcccgggcgcagtgatggccgccgctgacggctttacgattaaagtcatcgggaaaggcggccacggcgcgattcctcacgatacgaaggacgccgttttaatcggctcacaaatcgtcacggctcttcagcatatcgtcagccggcgggtaaatccggtgcagccggccgtcatctcagccggctcgttcactgctgaaaatccgtttaatgcgattgccgatcaggcagtcatatcaggcaccgtccgctcgtttgacgaaagtgtgcgcagcctgctcgaagcagaaatagaagccgtcgtaaaaggaatctgttccatgcactccgcttcctatgaatatcgtttcaagcgcggttatcccgccgtcgttaatcatcctgaggaagcggcgcacgcggcggcagccgcagcggaaacagacggcgtcacgaaggtcattgaaggagagccgcagatggccggagaggatttttcctattatctgcagcatacaaaaggcgcatttttctttacgggcgccgctttagaaaatgcggaaaccatttatccccatcaccacccgaaatttgattttaatgaaaaagcgatgctgacggccgccaaggtgcttatcggcgccgcggtaagctacccccgatagggcataaaaaacagccggtacattacgtaccggctgctgtgattcttaaatgaaaaacgtgccttgccgtctcaccgagctgtgacagcagtttataattggccgctccgcccacggcggctccgacgaccggcaaaagctgaaacaatttcactacgtccagataatcgcggtattcctgctgaaaaactctccaatcgacatcatgctttttcgaatcccattgttcaatcattgagtatatgcgtttccgctgttcaccgcttgagaaagccagctgaaaaataaacagcaaaaacaatcgctcatccctgtctttcacatcatagccgtaaatggaggcaagatcgaacagacatttcattttaatggataacagcaaagggaaatcagccatccctaaaaaaattccgccggcccccgtaccgataccttcggctgccgcgaccttttggtacgatgcgacggtttgtctggcgagggcatctttttcagcaagcgtcataccgtttgtatcccgcttgcttttcaccagatttgaacccgccattgttgcttcggtcatttttttaatgctttctgtgatgacggcatgaattttatcgggaatccgctcatttattttcgcctgcattcctttagaaaaacgttcaagcatagaatctttgcgcaaaaaacgcgctttccattgcagtgcttcctgtatcagctgctgatcgtcggtcatctgtgtctccttctttcattgaggtttcaaaaacccgattgattacagcttgccgtactttttcaatcttccgcccatatacgaaggcatgatcacaaaaatcagaacggctgaagcaacggccgcatacagcgccccgctgactcccgcggcataggctgacgctgcacaaaacagcagcgcctgcacggttaacgccgatttcatcagcgaaaagaaactttgcagcttcgctttctgattgaccgggtaaagctcctgcagagaaagatgatgaaaatgcccgaacagcgggagaagctgtattcccgtaataaagacggtaaatacggttaacgccgccgttatccacggattggcggaaacgagcataataatcaggataaaaataatcgtgagcctgacctgaatgccgagataatcatttgaacgcagaaaggcccgcgcatacatataggagaacgttttccgctgttcgaacggaatcattctgagcaaaaagtcgagatacgcccggcgttttgcctgttttttcaggtgaggcacatcggtaaacagattggcgattctgtaaaaccgctgcttccttcttaattcatattcaatatgggcttcccattttaatgatttatgttttgcggccgatgtgaaatacacataaaggccggccatcacaatgtagacggcggcagcgtacacataaaacgactgtaagacgaagtataaaagcagcatattgcagataaagcgtatgaccgcatccatcattttcatgcttctgtcattcataaacgtcatccgccactccatggcctgattccacgcttttaccgccagcatctgaataaatacggcggcatacgacgcaagcgacgcccccggacttacagcgaaaaacagaggcatgcatacaagcgacagagcaagaagcggaaacagctgtgacagatagctgtacttaaatgaatgcttaaagtatgtccccattttcggttcaagcggcagcagaaacacgaggtccgcttcctttagcagcgtccggacgtatgaaccggtcagcacaaatgaaaagagcaccgccatcacccaaaatgacggaaaatgaacgggaatgtctttgacccacttgctgtaccagcttgccgcgccggcaataaaaaagatcagcacaatgacgagatgatcattgagcatatatttcatatacattctggtttcctttatatgctcttcaagccgggactgccaaatcgtagacatattattcatggccggcgtcttccttcgtcagttcaatatacaagtcatcaagagctgcgtcttccatgccgaactgctctctcagttcttccagtgtgccgcttgcccgcacttcgccgttatgtaaaataatgaaagcatcacagtagcgctctgccgtagccaggatatgcgttgacatcagcacgcttgatccggcttttttcgcggcgtccatccgctccagcaatgcattgatcgcaagcgggtcaaggccgagaaacggctcgtcaatgatataaagcgaaggctccgcgagaaacgcgcacatgatcatgactttctgcttcatccctttggaaaagtgagcgggaaaccatttcagccttttttccattctgaattctttcagaagcggaggaagccttttttcaagcgtttctttggaaaggccgtacgccatggccgtcagctccagatgctccttgagcgtcagttcttcatacagcaccggcgtttctgggatgtacgtaaattgcgagcggtagctttccttatcctccgaaaacgtcttgccgttcagctcaatcgagcctttatgcgggtccattaatccgataatatgccggatcgtcgtgctttttcccgcgccgtttaatccgatgagtccgacaatctggttcggctcaagggtgaatgaaacattttttaagaccgggtttctcgtataaccgccggttaagtcttttaccgatagcagagacataatttctccccttctgattcgtttttcttcatagtaccaaaaataaagtctgatttgaaacgattccctttttttctcacgtgaaaagtgtgcatagttatcgttttgggggacatcataatgtatgtagaaggaaacagctttaatcaactgaaaatgaggtgtttataaaagacgtcttagaacagttggatgaaaatcaacatgtcctgtgcttacaatttcttcacacactgctttgatgatgttcttcattcatgatgaaataatcaaatgaggtgtttgtcccaggaatgattaagcagacccataagtcttcattttaaaaacaaatgaggtgcttacaaaaggcatattcaattttctatgataaagctcgtacttctgcatcagggtgaacgcgcagccgttcatcctgttttttgttttggccgtttttgtggtacgatgagaatatacatatatttcttttcagggaggaaacccatctatgcacaaagcggacgattgtattttctgcaaaatcattgccggtgacattccgtcttcaaaagtatacgaaaatgaacacgtcgtggcgtttcttgatatcagccaggtcacaaaaggccatacgctcgtgattccgaaaacacatatcgaaaacgtgtacgagtttacgcctgagctttctaaagaatattttgaagcggtgccgaaaatcgcacgcgccatccgcgatgaattcgagccgatcgggctgaatattctcaataacaacggtgaaaaagcgggccaatcggtgttccattttcacatgcatatcattccgcgttacggaaaaggcgacggtttcggggctgtctggaagacccacgccgaagactatacgcctgacgatcttcaggagatcgcttcaaccgtcagaaaacggcttgcctcatcttaaagatgaggtttttttgcgtccggaaacacaaaaaacataaattatatttttttataccaaaaaaatcaaaaaattgtgataggataattgtattatttcttacactaaagcggaaaacagggagagatcgtaaacatggaacgtacaacgaatttcaatgcaggacccgcagcccttccactggatgtgctgcaaaaagcacaaaaagaatttgtcaacttcaatgataccggcatgtccgtcatggagctgtcccaccggagcacggaatatgatgcggtgcaccaaaaagcaaaaagccttctgaaagaactgatggatattcccgacgattacgatattttatttcttcaaggcggcgcaagccttcaattctccatgctgccgatgaactttttaacgccggagcaaacggcgcacttcatcgtaacgggcgcatggtctgaaaaagcactcgccgaggcgaaactgttcggaaacacatccgtcacggcaacaagcgcagattcaaaccacaaccacataccggaagcggacctctcaggaatcaaagacggcgcctatctgcatattacgtcaaacaacacgattttcggaacgcagtggaaagagttcccgaattcaccgatcccgctcgtagccgacatgtcaagcgacatcctgagcagaaaaattgatgtcaaaacgtttgatgtcatctatggcggagcccagaaaaacctcgggccgtccggcgtcacggtcgtcatcatgaaaaaatcatggcttgaaaacgaaaacgccaacgtccctaaaatgttgaaatactccactcacacaaaagccgattcactgtataatacgccgcctacatttgcgatttatatgctgagcctcgtccttgaatggctggctgaaaacggcggtgtcgaagcggctgaacggcgcaatcaggaaaaggccgatgtcctgtacggcacaatcgacgcaagcggcgggttttacgcggggcatgccgcaaaagacagccgttctcacatgaacgtcacgttcaccctccgcgacagcagtctcacgaaaaaattcgttgaagaagcgaaagcggctaaaatgaccggactcggaggccaccgctcagtcggaggctgcagggcgtctatctacaacgccgtcagcctggctgattgtgaaaaactggctcagtttatgagaaagttccagcaggaaaacgaataaatttcttctaacataacggttcctttgatatactgtttgcatatcaatttttccggccatcgcaataaatgacgagcatattattggatggcgaaaaagcttagcagaggagagcttagtatgaaaacaaaagaattagtcattatggccctgtttgcggcaatcggagcggtgcttcattccattatgccgccggtattattcggaatgaaacccgatatgatgcttgtgatgatgtttatgggtattctgttattcccccgtgtgcagaacgtgctgatgattgggattgtaacgggaatcatttccgcactcacgacatcttttccgggcggacagcttccgaatatcattgaaaaaccggtaacggcgtttctgtttctcgcgctggcgcttttggtgaaaaagagcgtgaaaacagcggccgccgccgtcattacgatagccggcaccttcatctccggtttgctctttttggcgctggcccttctgattgtcggcctgccgggcggattcaccgcattggtgctcgcggtcgtccttccggcggctgcgctgaatacgattgccattatcattatgcatccgattgtgcagacgatcttaaaacggtccaatatgattgaaacggtgaaataaccgcataccgaaacctcttccggccggaagaggttttttaatgtgtttcagcatgttttatacgagaagttttgtgaaaaagataaggaacaatgcgagggcggttcctgctgagcagacgatggccttttggcggacgacccgcttcggcggataagaagcggcctggccgagcagtttcaggtaataaacggcgcccgccgcaaagacaagagccatacaagataaaacaatcataaagacagacaaccttctccctccttttcccttaaaaaatatgctaaaataaagcaagctatgtatagaagtttattcttctgaacaaaaatgataaaagttatgagaaaaaaaacggggtgatttcaaatggctgacggacgttcccttttaacaggcctttttgtaggcggattgatcggaggcgcagcggtgttactctcggctccttcatccggaaaagagctgcggggcaaaatcaaagagaattgcaattcaattgaggacacaatcaaacggttaaaaaaagacggaatggcgcttaaggaccagcttgtccaaacggcgaaagaaagcgcagaagtcattaaagacgtaggcggagagcttcagaccagcattaaaaggtggcaggaggaaatcaaaccgcaccagcaggatctccagaaggaaatcgctgatattgaagagaaaatcagacagctggagaaaaccttacaaaactaatatcctatacaaccaaaaaaaagtgcggacatattgcgttccgcacttttttttgcggtttaaagcctttcccagcaacggatcaagaatttattataaaattcttaaattttcatctttattaatctttattttattggcataatagaggaaaagaaaatgtgaagcaggtgatctgtattgaatcgtgttgaaccgccttacgatctaaaagaagctttaatctatacccaaaaaatggcgcagctgtccaaagcgctctggaaatctatcgagaaagactggcagaattggctgaagccgtacgaccttaatattaatgagcatcatatattatggattgcctatcagcttaaaggagcttctatttcagaaatcgccaaattcggcgttatgcacgtatcaactgcatttaacttttcaaaaaagcttgaagaacggggatatctgaaattttccaagcggctgaatgataaacggaacacgtacattcagttaacagaagaaggggaaaatgtattcgaaagcctgcttgaggagtttgatccgtcgagaaacgctgtgtttaaaggctcacagccgatctaccacttattcgggaagtttcctgaggttgaagaattaacctgtgtcatccgccacatttacggcgaagattttatggagatattcgagaaatcattgacaaacataaacaatgattttgaaagtgaagacggaaggctgaagaaaaaaacggacgaatcggctgtccatgaaacggctgaagagctggaaccgatcaacagttaatcaaagtgcttcataatctcaataaattcttccatcagcgctgtataaagcccctgctcatacagagcaaaaatcgtttcatgaacatctaatttttcgttcagctgtcccgcaaaaagcgcaaggagcttgtcaaacgtcacaaagccttgcgctttttgcgactccagctcgtcctccaattcgcggcagatccgcccgacctcttctccttcttcttcggtcagccctttttcaatcatcatcgcataaaaagggtacttatccatatccaccgttttcaccagcaattgtatgtaatattctaaacgcccgatacgctgatccattgaatccatccgtttcacttctttctatctttaatcttattttagctgataatgaatggagaagaaaggttaaaccgtacatttccatgtttcaccgagctcttctgttcttctctttccaggtttatttttttctttaaaaaaggattgattttttctcctgaagagagtaaattattttgagattgtattccatctttgtacggaaggatgactctgatgaattgctggaaaaccattaatctgatcaaagattatggtgcggttcgtttattattgactgctgtaggttttatgatcctgttttttatatgcaacttcttggcattcgggctgctgcgtccgaatatcagtttaagtgacgggcacgtgtttgctttttgtgttctgctcgttgttactttatttgtacataaagtcatacatgtcctgccgatgatctgtaaaaaaagaaaaaaggaaatgaaaatgtacttcttacggatgccgacatggaaaggcataccgaaaacgacgatgctgatttcaacgatcagcccgtttttattcattacgccgttattgttttatgccggactggcatttccgagacacgctcattacttttatatgatttcgagcattcatgcggggtattgcctgcctgatcttctgtttgccctgcatctggtcaaagcgcccaaatcatgtctgattgaccaggaatccgacggttttgatattttagtaaaaaaagtgccggagtcttgatgtcccgctgatttttcaggttacattctatcttttttaataaatatttggtaatgtaatatgggagcagttcagagagagggggaatctcccatcattttattctattttatcgtggctgccctgtttattctttatttcataaacaggctcacaaatacattatgccttgtcagagagattcctgaagaccggcaggataaggtattccgttttattaatgtatctattttaattttactgatctcttcattcgtcgagatctcctttactgtgtaaacaggcaaaaaaatatggctgacggaggtctgacccccgacagccatatttttttcttaataaagccaagaagcgccgatgatgatcaataagatgaacagaacaaccaataatgcaaaaccgcctgcaaatacttcacccatctccaaaagcacctcctacaaaacgttttatttttccaattacatcatatgcaatttacttctgaaacgattaggcgcccgggtaagaaaacggaccgcttttagaaaaagcgatccgtttcgcttaacaaatgtaagctgcacctacgatgataagcaatatgaacagtactacgagcagtgcgaaaccgtttgaatatcctccgcccatggttcattacctccttttcatgatcaatatatttgtatgtatcaggaaaaagtttgactagacgaatgccctttatttaaaatctttttacagaaagccacaatatgttatgatacgcatatgcaatttaatttggatgattaggagtgtttaaaggaatgaagaaaatcgcgatagcagctattacggcaacgagcgtcctggctctcagcgcttgcagcagcggcgacaacgacgtgattgccaagacggatgccggaaatgtaacaaaaggcgagctctacacgaacatgaaaaaaaccgcgggcgcaagtgtgctgacacagctcgtacaagaaaaagtattagcaaaaaaatacaaagtatcggataaagaaatcgataccaagctgaaagagtacaaaacgcagctcggcgatcagtacagcgcccttaaacagcagtacggcgaagattacctgaaagatcaggtgaagtacgaactgcttgcacaaaaagcggcgaaagacaacatcaaagtgactgactccgatacgaaagaatattacgacggcttaaaaggtaaaatccgcgcgagccacatccttgtcgctgacaaaaagacagctgacgaagtggagaaaaagctgaaaaaaggcgagaagtttgaaacgcttgcgaaagaatattcaactgacagctcaaaagacaacggcggcgaccttggctggttcgataaaaagtcaatggatgaaacattcagcaaagctgcattcggcctgaaagtcggacaagtcagcgatccggtcaaaacaaaattcggttatcatatcatcaaaaagacagaagaacgcggcaaatatgatgacatgaaaaaagaactgaaagaagaagttcttaagcagaaattaaacgacaactcagctgtacaggcggcaattcaaaaagtcatgaaaaaagctgacgtaaaagtggaagacaaagacttaaaagacacgtttaacacctcaacttcttctgaatctaaataaaaaaactgtgcgggctctcggcgagccgcacagtttttttatgcgatggaatgattggagttttcttccgcatccccgttttcacttgcgggcgccgccatacggcgctcgcgttcctgttccatccgttcaatatacacccttccttctttttcaataaacgactggtcaagcttttcctcttctttagctgttgtgaaaagcttataagcgctgaaaataattccgataatgcaaaggtatacccaccaaggaaaaaatagcacgtcggtttcctccctttttcacccagagtctttattctaagctatgcttgataaagacaagttatgagagctgaacgtaaaaaagaccgatcgtaaaggatcggcctttttttcttattgatggaacgtcggtttgtagaaagaacggttttcaagcgcaaatacacgctctgtgtattcgcccggcttcacccgttccagcgctctgtccatcatgatcatttttgcatccagattgtcaatgtagtgaagaatttccgcttctttcaccatcggcggtttcgggcttccccattccgcttttccgtgatggcttaaaatcaaatgcttcagaatcagcacttcttcagcgtcaatctgaagctcttcggctgcttttgaaagctctgtcaccatgattgaaatgtgtccgagcagattcccttccacagtgtacgtggtggaaacagggcctgaaagctcttttactttgccgaggtcatgcagaatgactccggcatacagtaaatcccggtcaagagacggatacagatcggcaatcgcttttgccaggttcagcatggatactacatgatacgcaagccctgaaacgaactcatggtggtttttagccgccgccgggtaatccataaactcagccgcatattttttgaccagatgtctcgtgatccgctggatgtttggatttttcatttcaaaaatgtattgagtgacggtttccatcatttcgtttttcggaatcggcgccgtttccagaaaatcatcaatgctgacattttcgttctcgccggccggccggatgtttctcagcttaagctggtttcgtccgcgatagtgatggacatctccgatcaccttcacgatcgtctgcgccgcgtacgttacttcatcagtcggcttggcatcccacagcttcgcttcgatatctcccgattggtcctgcagcattaacgtcaggaatggttttccgttgcttgcgattcccttagtcgaagatttaatcagaaagtattgatcgacctgctcgccgacctcgtgcagcataataccttttgccattctattaaaagctccctccatatcttacataataccagtatagcacatacctcttttttgaaaataaactcttttatgacaggagccgcatgacttgtccgctgtgaaaagaccggctgacatgctcatggcaggtgaaataaagtatctgccgcccgccttctgaaagctgattcagcacatcaaacagccgctgcagccgctgcctgtcaaaatggacaaaactgtcatcaagtaaaaacggcagtgataccgcagattccctctctgacgcaagggcaaaacgaatcgccgcataaagctgctcgcatgccgcctgtgacagttcgcctgcagaaaacaccgttccgtctttccgcataaccataatggaatcatcagcctcggaaaaatacaatttgtgatagcgtccgtccgtaagcggtccgtataatgcaccggcggtttctaacagacggggaagcgtcacttttttatgccgctccattttttccctgataatgtgtctgaccgtctgtaatgcggcccactctttagcggtttttttcacgcgctccttctgcatttctgtctgctgttttaaatcggatacaagccccgaggactccagctgctcttgcttcaccgttaataaagcggtttgctcacggagctgggcgcttttttcctcaagcgtttttttctctgtttccttctgaacgactgtatgttcaagttcggacactgtgcggctcatgtacggctccagctgttttccgcctatgccggacaagtgcgttttgatttcgcgcagctgccgctctgtttcccggcggctttcagtcagcctggcgagttcacaaaagtgttcgcggttttttgcgcctgccgccatgaaaagctgtttgacctgctgttcgtagtaatgaacttcttcatttaattcacgcatttgctcttgtgcatgcagcagatccgtttcgagcgcctgttttcgttttgcttcctcacgggcccgttccgcctgcgccagcaaaacgtgcagtctttcttttacggacagctcccttccgtctgaaggactcagctttttgacccggtcctcaaatgctctttgcagcttttgcagcctgcccgcttcaatggtcagctcatgcttgttaaggatttcttttttgacatctttcatcacatgatatgcgtcaagaagatgggaaggacttcctgaaaaccccagttccttcataaaaagttccgcctgtttttcagacggcgccatttcggcctcccattcttcatattggcggatgactctttcatatgccgcttctttctgttcaagcacggcttgatccgcaatcagctgctgccggtgccggccgtcacgccaaagctcttcctgcagaagatcagccgcttctttagagatcgccggcttctttttcttgtgtccgggccctcctctttctgacggcagcggtttttgcatgccggacagcatatacagcagcagagcgccggtaaaaagggcggcgggcagccattcctttaacatagcgaaaatcgcaatgaacagaatgcccgcaccgagaaagagctttttttgtttggcgcgctgtttttccagatgctgaacatgtgcctgccattcgtttccttctgtatcagccgtttgcttatatgattgtaaagcggcttctttttctttcctgacagcggggtccaaaatgttttctgccgtcaaggcatgttttcgttcggcttcttccagctccagccgcgcttgttcgaaaatcgcatcaagctgtgtctttctttctcttgcctgtccggcgctctgcacggcttcctgcagccgccattcatattcataatcggtgttcagtgaaagaatgccgtcctcctcatgtcttccgagctgctgcaatcctgacgaaacgcgggcagatgtctgccggatctgtgattggatggcggcaagctgttcgccgcgcgattcgtacatatgctgctcgccggaaagctcctgcagctgccgctctttttgcagcaagtcctcatttggagcgagcagatcagcctgccgcctgagttcagccgcttttgcccgaagcccctcaagacgggccgctttcggatggagatgcgattcgtatttttcaagctgatgcattccgtccttcgggaattgcttcaatgctaccggataagaagaaagttcgctttccaaggctgtttttttgtctgcgagcggctttgcttctatcgccgattttactgttttgatttcttcagttatgtctttcaatcgtgcttcggcatcctgcaaacggccgccggcgctttttttctcttccagaaggctgtgatagcccgcttccgcagcttccgcctgtttcagctgggcgctgagccgctttaatgtatccaactcctgatttaagcgggggttccgcccgttcggcttatacatcctgtcaagttcttttgccagtcgcccgtcaagctttgccgccgcttccgacccgaataagctcgaatacaggagaaactcgccgattttgtcccggttaaaagcttgaatctcctgcagtccgaatacatcgaacgaatagatcgcttcgtacagcgcccggtctgtatcggagagaagctgtttgagccattctccgtccttgatttcgcctgaagccgtatacactctgactttttcggcagcgccttttgtccgttcgattttgacagcgccgtgatcgccatgcttcaattccacagtgccgccgtaaaccccgccgtttttcggttcgtatttttttgatttcggaaaaccgaacagcacgcttttgataaaggacatcaatgtcgttttgcccgcttcatttaacccgtagatcacttgcacgggagaatctgacagctgaaaacttcggtcggaaaattttccgtattggtaaatatgcatcgccgttattttcatctctgaagctccttcatctggcgtcttaaaacggcttgagcctgccgcttaatatccagtatctcttcatctgtaaatgaagccatctgacgccggtatacgggatgacgctcaagggcttcaaatacaccgctcatgtctgcgcattgttctatgtcctgaaggagccctttaaaaaacggatcgggcggcacggtgtctgtttcatccgtccgatcctcaagcgcaagcggccagacgaaacattcctcttcggcctcttcctcctgtaaagcggaaagaagctcctccgcgatacctgcgggcgcctccgtccaaaagcggggcgccgcgccgcgaagcaccagcctgacacatgccgggcggcccgccgcgcgcaagccggagaatgtatccgatgcggctttcagaagtgaagtcatatgttcagctccggagatatccagatcaatttcctcccataacacatcatgcgcttctttgaattcccaagacatctcaccgtttgccgcccggacgagataatatcccttaggcccggtttcttttaaatgccgggcttgaatattccccgggtaaatggcggcgggatgctgggcggacagaacctgccgtttatgaatgtgtccgagcgcccagtaatccatgccgcttttttcaaggtcttctttcgtaaacgggcagtacgggtcatgcccttccgctcctgataacatgccgtggagcatgccgatatgataaggcgcgccggtcattttccggtaacgggccgcctgattgaccgttacgcttctttcctgatagctgcatccgtatatgcttgccgcaagctctccgtttttaaagaaagatttttcctccggtgtatccgaggtgaagatatgtacattttccggccattcaatcggcgaccacttaccgcccaaatgatcatggttgccgaatatgacgaacacttggatatccgcttcctgtaatctcgtaaactgttttctcaaaaacagctgggcttttaaacttctgttggcttcgtcaaacagatcccccgaaagcagcacgaaatctgcctgctcccggagtgccccgtccgtcagtcggcggacgctgtgaaatgtgctttctttaatacgcgcatataccggttcaggcagattcgaaatgccgtaaaacgggctgtccagatgcaggtcagcggcatgaataaacgtcagatcagccatctcgccctcccctttctgcaaattgaattacccttattttagcaccgtttttatacgaatgcacgttctgtaaaataaaaaaacagcccggctgttccgggctgtttcacttattttttggagatgcgcagcgcttgtttgatcgctttgaatccgctggcgtttccgtaaatcaaaacgccgcctttgtaaattttcgcgccgaccgctgcaaagatcacgatagtgagcagtgtcagggcgattccggccgcagcctgccaaaacgggatatcgagcatcccgacgcgtaaaaacataatcatcggcgtgaaaaacggaatgtaagaggtaacggtaataaaaccggcgtcaggattgccgatgccgaacatggcgatcataaaacctgccacgactaaaaaaaccatcggctgaatcgtctgctgtacgtcctctatccggctgacaacactgccgagaaacgcggcaagcgtcgcgtaaagaaaatagccgagcaaatagaaaatgacagcatagactatcgtcgagacgggaacatccttaaaattgagaaatgcactgatcggcgacgacgcatcattttgagggttcagcttcagtgagagataaccagccgcaatcagcaccgcaaactgtgtgatccccacgagcgcgataccgaacagtttggcaaacatctgctgaatcggcggcatgcttgaaattaaaatttccatgacgcgggacgatttttccgtcgccacttccatcgcaatcatgcttgcgtacatgataactgagaagtagatgacaaacagcatgatgtagacaagccccattacctgaccgagctcttcctcagatttcgcccctttttccagcgcgtctttgctgacttccggcggagtgtagaggctgctgactttttctgccgaaatgccgagcttggcggtttcgacagcggtttttgtctgggttaaagcctgcttgagcagtttatacgctgattcatcagaaatggtcagcgctttgtatgctcctgttatcgttcctttttgatcttgtctgatgataaacagtccgtcccattcaccgtctttgacacgctttacggcatctttttcggactccttcgtctccattgcctgcagatcattgtctgtatccgccgctttaagctgttttgcaaacgccgggtacagcccgcccgtttcatcaatcaccgcaatttgctgcttgccgtcatccgattgaaacacggatataatcgattgcagattggtcaccgctaatactaataaaacggtaatggcggtcgaaataatgaatgactttgtcgcgattttgtttttatatgtatgaaacagcataatccaaaatttattcataaacggcccccaccttttctataaaaatatcatgcagtgacggctcttccaattcaaacttccgtataaaacctttcccttgcagcgcccggaaaatatcctgagaaaccggttcattcgcgacctgcagtctgattccgtcatttgtttccttccatttcacgacgccttcatgcgtttttaaaaagctgaggtcatcatctgaatgaacggtgacattttttttgccgaaagaccgcttaatgtctttcagattgccttgaacgacgggttttcccttctggagaatgcacaaattctcgcaaagttcttccacatgctccattcggtggcttgaaaaaacgatggaaacgccgctgtttttcaaagaaataaccgcttctttcagcagctcgacattcaccggatcaagaccgctgaaaggttcatcgagaatcagcagttcaggcttatgcaggacggccgaaatgaattggattttctgctggtttcctttcgacagctcttcgactttcttattcttgtaatctgtaatgccgaaccgctcgagccatgtcatgagctctttttccgcctcttttttgcccattccttttaatctcgccagatagacaagctggtcactcaccttcactttcggatacagcccccgctcttccgggagatagccgattttttcactgatggaataattgaccggctgccctttccaggtgatatgcccgtcagtcaggcttaaaagacctaaaatcatccgaaaggtcgtcgtttttcccgcgccgtttgcgccgagcagcccgaacatttccctttcaggtatttgcaggttcaaattgtcaacagcggtaaagctgccgaatgttttcgttacgttttcaattgtaagcacgaatccaactccttccttgacccattatatactaataatgggtaaaaattaatggaggattttaaattctttatcagaatatcattctataaagggggtgacatgatgggacaatatgtattgaccgcattccatgcgtcgggagaaacgctgctgaatgaacggatcgaagcggataatgaggcggaggcgaaggccgccggagaggctttattgaaggaaaaaaagcttgagaacagtactcatcgcttggtaaatgaagccggaaagctgattttattccacagataacagaagctttccggcttctgtattttatcggttaaattgcggcgtccgtttttctaaaaaggcgcggatgccctctttatgatcatccgtttttctcatattttcctgggcctttcgttcaagagacaaaacatcttttaaccggctgatatggaggctctgataaatagccttcgtttcaatcatcgctgacagcggcgcatgcagcaatcggtcgatatacggttgtgccccctccgcagggccgccgctgaacagcccgtcggcaagcttgagccgcaccgctttttcagccggtaatttttcaccgctccaaatcagttttttcgcttcgatctcaccgacgcgtctcattaataaataatggcctcctccatcgggaaccaatccgatgccgatgaaattcatcgcgaggcgggcgttttcttcagcgagcaccacatcggcgcacagcgcgaaactcagcccgagccccgccgcggctccgtggatggcggctatcacaatttttttcatatcatagagcgtcagcgtaatggattcgatcattttcatgagccgttcatattctcctgaatcatgatcagacgtcatcatctggatatcaccgcccgcggaaaatccccggccttccccccgcaagaggacgataagcgcttcgctgtcggctgccatcacgcatgcgttttccaattcccggagcatttgttcattcagcgcattgtaactgtcaggccggttcagcacaatctctgcgatctttcccttttcttcatagcgaatatactgcatgtttacatcctccttgaatccgcttacatattttgttcaaatgatatattccttccgccgaagcgaaattcctttatttttcaaggtcaatagataccgaaaaatgcatatcatttgaaactgaacatacatttttatatagtgaaattgatatacaaaacaaaaggggggaaaaacgccgataatgaaatatgtgatactcagcttgttactgagcttttttatggtgctgttccccccttcggatgtcgctcttccttcccaattggtgacagaaacagacagccatgtacaaatttcggtttacccgcaggaaacggattcggcaaagacgccggttcacaccaaaaccgctccgcaaggcctgtcaaaaggatacggtgcgttatcccggatgatctccctgttatctgtcaaacctcttgatcaattcattgattccacaatggaaaggacatgcgccattccgatacaataccagtcaaattacctccggcatcagacaatttctcattgccaatctgtatttacgatgtaaaaacagtatattccggagggattttttatgaatattaaagaaaacgatctgcccggcatcgggaaaaaattcgaaatcgaaacgagaaatcatgaaaaaatgacgatcatcattcatgatgacggcaggcgggaaatttacagatttgatgaccgcgaccctgatgagcttctggcaagcatttcacttgatgatgcggaagcaagacagattgccgcgattatcggcggtatggtgtataaaccgcaggcgcttgaatcgattgaaatggcgttcaacgatctgattatcgaatggtttaaagttgaaaaaggggcaaaagcggcagggcggacgctcggcgaactggatgtgcgtcagaactatgacgtgacggtcatcgccatcattaagcataaccagaaaaagcttttaaacccgggcgctgattcgctccttgaagcaaacgatacactcgtcctctcaggtgaaagaaagcatctgaaaaagctgatccaagacttcctctccagagacggagtgtgatctgtttatggaccatctcgtatttgaagtcggtacggcgttagttcttgtagccattgcgagtgtcatcgccaataaaattaaattctcgatcatccccttcctgatcattttaggaatgctcgtcgggccgcacgcgccccaagcgggcatcattgacctgacgtttatcgaaagccgggaagtgattgaatttttcggacggatgggcgtcctgttcctcctcttttacctcgggcttgaattctcggtcggaaaattagtcaaatccggacgttcaatcgccgccggcggaacgatttatattctgattaatttcagtttagggctgatatacggctttatcacaggcttttcctttttggaagtgcttgtattggcgggcgtcatcacgatatcatcaagcgccattgtcgcaaaggtgcttgtcgacttaaagcgcacggccaatccggaaacggagctgattctcggcatcattatgtttgaggatatctttctggcggtttacttatccgtcgtttccgggcttgttctgggagacgcgacgtctgtcggaggcgcgctgatgtcaatcgtgatcgctttcggatatatgctgctgtttttcattgccgctcgaaaattgccgcctctgctgaacaagctgcttgatatccgttcaaacgaggtatttgtcatcgtcattttcgccgcgctctttttcattgccggcttttccgaaacgattcatgtcgctgaagcgatcggcgcgctcttgctcggactcgtgttttcggagacggcccattctgacaggattgagcatcttgtcgtgccgttccgtgactttttcggggccatgtttttcttcagcttcggtctcagcattgatccgttttcactcggagatgcggtatggcttgccctcggcgccgttctgctgacgattgccggaaactttatcgccggcatgatcgccgggcgccgggcggggctttctcataaagcatcgtccaatatcgggctgaccattgtgtcacgcggcgaattctccattatcgtcgcaaatctcggcatcgccggcggcctgtccgcttcacttaaacctttcgccgccttatatgttttgatactggccatcttcggccctttgctcacgaaagaatcgaagcggatatatctcctgttgaacagcgtgttcaaatggaagacgcctgaaaagaagccgcagaaatcataaaaaaaactgacctcttcataaggggtcagtttttttgagcgggaagaaattgctgaaaagccgtttttttattaatggagaaatgctcttttcccagaatggtattgatgattttttggtttctgtaaacagacagcttcaaattcgtagcgcccgttccgtgagcatgatcaagattcgttaatgtgaaaaaatgatgccgcctgtcgtccttaaagacaagacgggaatcggccgtcactttaaaccgtttctcatcctcccattcgatatcgggggcaattgccgtaaaccattccggaatatgaggtttaaagccggtcgccaaaatcactttttctgaatcggccgtaaaggtttcatccatctgccattgatgaaagctcagtacgcagcgcccgttttgcttttcaatttttttaagctccgccatcggctgaatatatacgtcaggcgaacctccgctgatcgatctgtgatacagggcatcgtaaatggcggcaagtgtgtcagaatcaatgccgtggcgcagtccgtccagctcagggagcgtgttcagccgttctttaaaaggcaggcggttaaaatattccacataatcaggtgtaaacatttcctgtccgagcttggcggtttccaattctcggaatccggcggagcgtgtcacccattgcagccggctgcggcggtattgttcatcgtgcaataagtcagaaaagatctccgcggcgctctgtccggagccgaccactgtaattgattcggcgccggcgagctcgtctttccgaaacaaatattccgtgctgaccatcgtgtcctgacgcgcttcggcagcaatctctgcgggaataagcggttcagaccccgtccccatgacgaaatgcttcgtttgatagacactgatgcttccgtcctcaatgttcttgacgctgacgtcataatgtccgccggcatttttcacgccgattacctctgagccgaaacggcatgatttgatttctgaagccgcccagctcaaatagtcgttaaattcccgtctcggaatatcaaattcattaaacgtataaaaccggtacagccggtcatgttcatggagaaagtttaaaaacgtgtagcggcttttcggatcggcgagcgtgaccaagtccgccagaaacgccacctgtaaatccgtccctttaattaatagaccgggatgccacgcaaattctttctttttatcgaaaaaaagagcgtctgttccgggtatatcctctaacaatgcggcaagccctaaattaaacggcccgattcccgctcctatgacatcatacatattatgcacctcttgcgaataacagtctgatggtcttttcccgtttttgcagacggttaaacataaaaaaacggcacgctgattccgtgccgtttttgatattataatgcagatttgacgaacatctcatctaagtatttgattttctcttctgtataatgctcgaatcggtcattatatgatttcggatctttcggattggcgaagtgcgtgatttttccggtttccggatgaatgaatttgcttgccgcgccgcagccgataccgataatcgtctgcacttcttccataatcataatgttgtagatgctttcctgaccagggaaggagtagccgacattttcaaggtttccgagaatgtttttctgccggtacaagtagtacggcgtatagccgtgctcttttgtccagcggacggcgtcatccatcatgcgggacacttcctgtctgtcggcaactttatacttatgcttgtttctcgtcatttctgacgcccgtttaaaagaaagcgtatgaacggtcaaagattcaggcatcagcttttccgtttcctcaagactgtgcctgaactcagccgtcccttctcccggcaggccgatgatcaggtccatgttgatgttgttcatgccgtgtttgcgggaaagatggtatttttcgatggtttcttcaactgtatgatgtctgccgatggccttaagcgtttcgttttcataagattgcgggttgatgctgattctgtcaatcttatacttatttaaaacggccagcttctcctccgtaatcgtgtcgggacggcccgcttcaacggtaatctccctgatattcgcgacatccgggaaagagcggaccatttcttcatataaaagatccatttcttcagcggtaatgcttgtcggcgtgccgccgccgaaataaatggtcgtcactttgatatcatgccgcttcagccattctccgattttctgcatttcatagtgaagcccccataaaaaggagccgactcttcccgcctgtccttgaatggcataagccggaaacgtgcagtaggcgcattttgtcgggcagaacgggatgccgatatatatgctgacttcatctttgacccggtacagatcgggaaccgcagcgagctggcggtcgacgatctcctgcatcagattgattttttcatcatggatcagataatcttttttcagatcggcatgcgcctcttcttttgtcaggccgctctgcagctttttatgaagaagtttagtaggcctgatgccggttaagattccccatttttgtgtcatgcccgtatgcgattgaagaagatttaagtagacatatgacagcgtatttttcacctgtttaaatacttctttttcgctccatccggcaagaagcggtttcgtatgatgttccttttcgccggttcctttgatttctccggataccgacacgctgtctgcatcttgagaaatggcaagtgagatgacgagatcagagggttcctccgtttcgccgtacgcaagaacacactcttcaaaaaataaattcgcgatgttttgcagcggacgatgcagcctctcatccgtgatgccgtctatttttatttgcaatgtgatcaccttatttttcagattcaaaactttctttagtgtacagaaagaacaggctaaaatcaatccgcgaaaaagccgcagaccggcgtttcgcgtctgcggctcttgattacggccgtttcatatggaacttatcgagaaagcctttgcggtgctgcatgcggaaatattccttaatcatataggcgactccctgttcatcatttgaccttgtcacccagtccgcttttctttttaattcatttgaggcattccccatcgcgacgccgagaccggccagctcgatcatcggcagatcatcttcctgatggccgatagctacaacctcttccattgaaagcccgagatcagcggcgaccatcgaaagtccgctttcttttgaaacccctttaggcacgatgttcagtttttctccgttgacgcggatcacatcgacggccgggaatgctttcattatcgtatccgttatatcagcctgcaggccatcttcggcatgcacttcaatgacgggcgctgaaaccggctcatcaaggagcaggtcacttaatgattcgacaaactgcaccggataaaaaatcgggtcagacggatgaatcatcgttttcccgaccagattggagttcactttcttcttgtttccgatcgaatatttttcgtgaagaagccggatattgcatggatagctttccagcacctgaacaatattaaacgtatgatcttctgatattttcttttcaaaaaacggctcatctattttttcagaaatgtatgcgccgctgtgggtaatcaatttcgcattcagctttaatattttcgccactttttgagcggagcgaaaatggcggtttgtgaccagtgtgacgtaaattccttttttcttgacgtattcgatggcatcctttgtcgtctgatgaagtttgccgttggagcgaagaagcgctccgtctatatttaacgccagcatttgttttgacacagagaagtccccctccttgatgactgtacttgtcattaggatatgaccctgtctctttgtttagaacaaccttttctccgcagcaaaaaagcctgcctcaagcagactttgaactgtcgttttgttgggatacgatcgatttgctgccttctccccaatgtgtatttctatttacgaaatatatcaggaaccccttatttgaccgttgatgcgctcgtttcacttactctctgttgctaccccttaacataccaggcagtataggcgaccgtatccttagatcatctgtaagtgtaggcgctttcagagttattatctcaattatattgttaaaaaacaagggtttttttaactaaaaaaatcagaggaaatatctatgctgaatgtatgataaagttgaaagagaacatacattctcatataataaaagaaaaaaagcggtgactgtcatgtctctattaaaagatatttataacgaagaatttgcagaagcacttctgaacagaatcaaatcggcgtatccggcttttgagcgggacaagtgccgggcgctgatgtttcaggaagattggcccggactgacgttaaaacagcggatgcgccggatcacagactctttatatgaaacactgccgaaggattacatacgggcgcttgacgtcttatatgagacagctccccacttctcagggctcgccgggattatttttcccgattatgtccaacagtacggaacggatcactgggacgaatcaatgaaggcgcttcagtatttcactcgtttttccacttccgaatttgcggtccgcccgtatatcaggcttgaccgggagcggatgttcaaagagttcctttcctggacggagcatccggacgaacatgtcagaaggcttgccagcgaagggtcaagaccgcgcctgccatggggaatctccattccggctcttcttgacgatccttctccgattctccctgttctggaccgcttgatgcaggatgactcgttatatgtcagaaaaagcgtggcgaataacctgaatgacatctccaaaacacatccggatgttctggcacagatcgcagccgagcggttcggaagctgtccgcacacggactggattttgaagcacgcctgcaggacactgttaaaaagaggagacaaacaggcgcttgcggttttcgggtttgaagacgcctcccggatttcattggaacgttttacattgaattcggaaacggccgccatcggaacaagcatacatttttcttttcagatccgctcatccgcccggcaaaaagtcagggttgaatacgcgattgattttgtaaagaaaagggggcaccgcagccgcaaggtgtttaagatgtcggagtccgccatggataacggagacgtaaaagccttcagcaaacaccattcccttaaagatttaaccacccgcaagcattatcggggaattcacactctgtctgtcatcattaacggaacggtaaaaggttcgcttgatttttctgttgaataaaaaaacccctccatttcatagatggaggggtgtggagcttattccgggctgccgtaaagctcttcaagaggtttcataatgattttgtttaactcgccgatcagcatgctcatgcgctgttccgcttccatcagctgagaaatcaattcatgctgctgtacgagagccaccgttttttgtgcctgctctacctcttcctgagtgatttcttcacctgacatctgtttctgctgcagctgcagctgtacattgcggaagttatcaaacatgcgttttgcggattcatctgcgtttacttgatcataaagccctctcagacggctgtattcatcactgtttcgcaaagctttttcaagatcatatgctgcatcataaaaatgaactgccatagtaaccgctcctttcttcctttcggacataccactccactataacagactgcggagcgactttcatcatcggcgtatgttttccttagaaaagaatgacaaacaaagcctgaattgctccgattatcccgccgagcagaccgcctaaatacgttatcatcttaaattctctcttggaaatcgacagcaccatttcctccagccgttcaacgggaaactgatcaacctgctctttgaccacttcctcaagacgcagccgtttcagcacattctccaaatgagcggcaatactgccgagtgccgcatcaagcagcttcggcgcgtacgttcccgtaatctcaccttcataacgggagatgatgtcaccgagccggcattcgaaaaagggcgcggtttgaagtgcggccaaagcccgctttttcatgctgaacagcagatctttcgcattccacttttcatcggcctcataaagtgtataagatttgagcttgccccattcttgagaaagcagatcagccagaagctttttcgtttcctcattgcgcaaaaactttaacagctcaggcagcacacggtctgccaagcttgaattgccgaggaacatctgcaccatgctgccgagcatcccccgggaattcaaaaagtcgtcaatcatatttccgagcctgtctttcccttcttcactctcaaaataatcaatgctccgcttcagaatataatctgcggccagcgggactttttcatccagcttttcctgaagctcatcaggaagccagtcttttatggcgcggtgctcatatttccggtacagttccgaaagcttttcatcggtaaaacggtcaatccaggcatccgtcttttcctgcggattccggatgcccgcggcggccaaagcttcgtgcaccgtcatctcggaagcggccattttttgcgtgaattgttcggcgaaaagaagcgcctggtttttaacggtatctgataaaagccgcttttttattccttccggggttaaaaggtggttcgtcaccatgagccccatttgttttgccaattcatcccgtcttttcgggatcagccccggcgtaaacggaacccgttttccgaacaggtaatacggccggtacggacgaaataacatctgaatggcaagatgattcgtcaccgcgccgatcgcggctccgatcacaatcataaatagaaacgttcctgcaatgcccattccttttcttctgcctccatcttatgttctattttcttgatgatatatctattcgtattatagaggctggcgggcatgcgggcaaatgaagaacctgaattgttgtttgtgaggaataaggcaagatgctgtttcgtactctttacagtagatcatcttttatgatgcgcttagcatatttattggatggaagggccgttccatcagcggctttttgaataaagggggagtaataatatgacaacactcggttttatgtctgtatcccgccggcacgaagaagattacgccggggaattggctgaaagagcgcctcaatataatgtgcgcttagcccgctttacaccgtttgatatatttccggattctttgcgcgtgaaagcgctcgtctatcacccgcaaagcggaaagtggaacgaaacggaaatcgatattcccgaatatatttacgaccgctgtttttacggaaaatccgctgaagcgcaaaaagccaaaccgatcgtcgaatggctgaaaaaatatcggaaaacggaatttatcggccgggggcttcctgataaatggacggtcacggatgcgctccaaaagcatcatctgatcagtccctatattcctgaaacggccgaagtcagccgctatgaacaggtgcaatcatacttagccaaggaaaaagcatgtatacttaagcccgctttcggcgcgggaggcagaggcatcatcctgcttgaaacaggcaaaaaatcaattacggccacttactatatcggaaaaaacaaacaaacaaaatcattttccaatcacgtgtcttttaagtcttggtgcaaaaaagtgctgcagcaccgctatttgcttcaatcctacttaaatatccaggataaagagcggcatccgtgcgacatccgcattttcatgcgcaaaactgagtcaggcgtttgggaaacggtcggaaaagcggtcagaaggggttatcagaacggtcttttatctcatttgcccggaggatctgaaccgattaagtttgacacatggtttgaggaaattccgagaaagcagcaggccgttttattggatgatgtcttttcgatcacccaatccgtcccttatttccttgatgaacggttcgggccgctgtttgagctggggctcgatatttgttatgccaaagacggacgcatctggcttttggatgtcaactcaaagccgggacggaaagctattttaagcgtggctccggaggcgaaagaggatttgtatacgagtccgctgagacgcttccgcgaacttcagtcacaggaaagccggaaaggagtattaccgcgtgaatcataaagggatgattgtcggcatcgataaaaaaagcaaaaatacgctgtttctcccctcctccatgaaacgggaagggcttttatccgctgccttcgggaccaaggttgtcaaatgccgtgtagccttttctcaatcacttgaaaaaagcgcgctcctttctgaagatttgttcgaggagctgttgataccgcataaaagccgggctgactttctcatacacggccagacggtgcacatcggaccgctgatcggcgttttcacagccgggttcacatcatcgccgtcccgcccgttaagagaccgtacagccttcttttccaagatgctctctcttcatgaacaggcgaacggatattgtttcgttttcggggcccatcagatcaactgggaagaaggcactgtccaagcgctgatttataaagaaaacagctggaaacggacggccgtcccgcttccgaatgtcgtatatgacaggctcccgagccgaaaaacggaagaagttccgcttttacagcagacaaaacaaaggctgatgaatgactatcagattccgtggtttaatccgcaattctttaataaatgggacattcataagcttctggaaaaaaacagtctcaccgcttcacttctgccaaaatctgtcctgcacccgaatgcagaagcgttagaaacgttatgcagcacgtttgacaccgtctatatcaaacctgcagacggcgcactcggaacggggatttacaaggtggaaaaaacagatgccggcttatctgtcaaacacacgaatgaggaaaaaacggtggtgacggcagagtattcagatgcggcatccttcatgacatcatttaaagaaaacaatgacccgtccgcatttttaattcagcaaggcattgacctgatccggctggatgggcgccccgtcgatttcagggtgcacacgaataaaaacgccgaggggaaatggacagtgacggccattgcggcaaaaatttccggtgaaaacagcatcacgacgcatctcgcaaccggcggagaagtcaggacgttagctgaattatacggcgatccgagagagagagtcggcatgatgcggaaactttcaaaagccgccttggcggtcagccgcgtgttaaatgagcacattgaaggttttatcggcgaaatcggttttgacctcggcgtcgatcattcagggaaagtttggatgtttgaagccaattcccgccccgggcgcagcattttttcccatccgaagctgagatcggtcgattacctgacaaaacggagaaattttgaatacgcgtcgtatttatcagaacggtccatcaccgccccggaaaaactttggcggtgaggctgtctttttttaggtttacccgggacaggcattgaacgatgagctacaatgaacaagatcaacatttcccataaggagcgtgaacgtcatgatttcgcacttcagctggaaaccgttattcaaaaaagagaaactgcccggatggcggatttcattttactggcagggtacgcattacgaagggatttaccacaagtcaggagacattgaatggggacacacacatccgggaaaagaagagccggctctcgtaaaagagctgcatgaattaatgctttatcacatatatgactgaaagctaaaagctcagccgcaccaggctgggcttttctttttccttccgctatttaccacaccgttttccgaatgagatgccgtttgattcaccataatacgtagtacaaagcggcaaacagcattgggtgaagccgagctggcaatggttttcgttccgaaaatcatcggctggtgcaattccagcaaacccaaccatactactttataaaggagatcatacaaatggcaaacaacaactcttcaaaccaactagtagtacccggcgctgctcaagcaatcgaccaaatgaaatacgaaattgcttctgagttcggcgtaaaccttggcggagaaacaacttctcgtgcaaacggttctgtcggaggagaaatcactaaacgtttagtatctttcgcacagcagaacatgggcggccaaggcgtacaataactcaataaatggcttacagaaggcgcgggataccgcgtcttcttttatgccgtcacccttttttcctattccacataccctaggaaaaaaggagggaaaacatgtcattcattgcctcagtcaattgggagctgattcagttcgtaagtgtttctttggtcaatgaatatgttgcccaccatttcccgtttattcacaggtattcttttccccgctgctttgaatgatataatgagcggcgaggaggttttttacatgaacatcgctttactcggagcaacgggaagagtcggacaggcttttataaaagaagcgcagaaacatggacacatggagatattcgctcttgtcagatcagccggaacagtccttcccattcctgaaaaacaaatcataacagggaatgcgaggcggcgggaagatgtaagccgattgatttccaaagcggacacagtcgtgagctgtctcggcacggacggtgacgataccctttcaaccgctatgacccatataatagacagcatgaaacggcatcatgttcagcgtctgattacgatcggcaccgcgggtatccttcaatcacggcttatgcctgatcaataccgttttgaatcggcagaatcaaaacgaaaatcaacaagagccgcaaaggaacacgcccgcgtatacgaaatgctgctggcagaggatcttgactggacgatcatctgtcccacctaccttcctgacggagatgctgccggagtttaccggttcgaacaggatcgccttcctgaagacggcgctgaaatcaccgtcggagacacggcgcactttctgtaccgtgagctgatcagcccgcagtttgtcagaaaacgggtgggactggcttactgaatgaaaaaaagggcgaatctttgattcaccctttccgattacaccgcggacttcgccgttcctttctgcaattcatacatttggtggtactgccccttttgcgccattaattcgtcatggcttcccttttcaataatgcggcccttttccagcacgagaatctggtctgcgtgtctgatcgtggaaagccgatgggcgataataaatgtcgtgcgtccttcttgaacgacttgcagcgctttttgaatgactgcttctgtttcggtgtcaatgtgcgccgtcgcctcatccaaaattaaaatggccggatcgaacacaagcgctcttgcaaaagaaatcagctgacgctggcctgaggacagtgtgccgcctttttcggtgacgggctctctgatgcccttcggcagggattgcagaagacttgcggcgccgacttggcgaagcgcttcttccgcctgctccaaagaaatacgctgatcatcgagtgtcacattggagccgatcgtgcccgagaaaagatacgggtcttgcagcacaatgcccatatgcgacctcagctcctgcctcgacatgccgtatatgcttttattatccagcaggatatctcctttttgggcatcataaaaacggaacagaagattcaggatggagcttttgccggaccccgtatggccgacgagggcgaccgtctcccctttttcagctgtaaagctgatctgtttcagcacctcttccccctttcgatatccaaaagaaacatcgcggaattccacagttccttccgcctttctgtctgcgggagcgccttcttcttctgtttcctcctcctgtaaaagctcgaatactctggcggcagagacacgggccaattcaagcttcgaaaattggttgacaatccccgtaaccggctggaacaaacggtttaaataatcaacaaatgcatataaaacaccgatcgaaacaattccggccgcactcagactcgcgcctccgaaataccagatcagcccgacaaacgccagattgcgcaacacattgacaagactgtgggacatgagggaatttaaggacagcattttgtttttgtagcgaaaatgagcttcattcaattcttcaaattccttcatcgtttccttctcgcggcggaacgcctgaataatcggcattccttgaatggactcgttcattttcgcattgatgtcactgttaatggaacggattttttggttgaagacggatgcgtatttgcggtacacaaccgaccagatcattaaaatcggaataatcagcaggcaaacggcggccagcctgacgtcaagcataaacagcgccgtaaaaatgccgagcatataaacgccgcttgtgataaatgtcgacagcaccgttacatataaatccctgaccgcttctgtgtcattcgtaatgcgggccacgacttttccggcaggcagattatcaaagtagcggatcggcattttctgaatgtgtgaaaatacatcctgcctcatgcgctgtatgatccggttcgctcccatctgcagcagataatgctggccgtaatgaaaacatacggaaaacatgagcagtcccgcgtaaatggcggtcagcgtcagcaatccttttatttcgggacggtaaaattgaaaaatctcctgtcttgataacgtaatggcgggatatgacctgctttctttaccgtttgatattgtcagccggccgtcagacaccgaacggtttccgtcaaaactgacgggacggtcaacaaaatagtagcccgcaccgacttgataaatgtgcgcctctccggttttgtccgcccccggtttgagccggtcctccctgacataatcatgcccccggaacctgacggcgcccggatcgtccgcagaggctttaacccatgttttttcaatgccgagaatgtggtcgtcaatcattttttttccgataaacgggccggtcagctcagtgccgaccgcaataatgagcaggacgaccgcccatatcagcagcttcttatattgaagcgcgtaattccataatcttctcccggtcttcatgcgcccgtccccccttcttcaagagaggacagctgctgcctctcatattgttttcgataccagccgttctgcgccaacagctcccggtgcgtgcctctttcagacacccggccttcatccatgacgagaatgagatctgcgtgttcaactgccgagagccgatgggtggtgataatcgttgttttatgccgccgttttttacggatgctgtcaatgatggcggcttccgttttcgcgtctacggcagaaagcgaatcatctaatatgagaatgtcaggatcggtcaaaagcgctctcgcaattgagatgcgctgcttttgtccgccagagagcgctacgcccttctcgccgaccagcgtctcaagcccgtcggaaagcataccgatatcgttttcaaaatgcgcgtctttcagcgcgctgccgatttcctcttcgtttgcatcctgccgtccgtaaagcagattctcctttacagtctttgaaaataaaatatgatcctgcggcacatagccgatccacccgcggagctcctcaagcggaatcccctgaatcggaacacctgtaaacgtgattgctcccgcgccgggcggatattcacgcaacagctgcttaatgatcgtcgtctttccgcttcccgtcttcccgacgatgccgagtgtctgccctttttctacggaaaaagatacatcagaaaccgccggtcccgctccgctcggatacgtgaaagtcacttgttcaaaaacaagacgcccgggctccttgatgccggcggggtgcttgggcccgatcacgtctggctcataggaaagcgtctcattgacacgatccaaggaggcatttccgcgctgcataatattgattaattctccgatcgcaaacatcggccagatcatcattccgaggtacacgttaaacgataccagctctcccagcgtcagccggttttgaaaaacgagataagcgccgtagccgagaccgatgagatagctgaggccgacgagaagtttcacagtcggttcaaaaagtgaatcgataaacgccaccttcatgtttttctcatatacatccgccgtcatatcaccgaaccggctgacatcatttttttcctgcacgaaagcccggatgacccggacgccggataccgactccagcaccttgtcatttaatgatccgaaagcatcctgcgcttccgtaaaccgctcatggatcttttttccgtacaggctgaccgcagccgccattatcggcagcggaataatcgcggcaaatgtcagcttccagctgatgagaagccccattgtcaaaaatatcgtcagcatatacatcgttgaatcaacgagcgttaagaccccgaagcccgtcgtcatactgacggcctgcaagtcatttgtcccccgcgccattaaatcgcccgttctgtatttctcgtaaaacggcggtgacatttgaagaagccttcccatcagctttgaacggagaatcttctccatgacattcgccccgccgaaaagctgatacatccaaaaataagacagtaaatagacggctgccgttaatgcgagaaatacacatatgtaaaacagcatcccgctttttgtaaacacgcccgccttcatatcgtctatcgcgttaccgagaagtttaggcggaaacatttcaatgacattcacaatcaataacagaacaatcgctgtcgtatagcgcagccaataggctttaaaaaaccacgcgagcttttttaatacagtaaacaaatactgtcatcccctttcatcaatcagccgccctcaagcttttccggattgtttttcattgttttcgctaataccgccacatgcatcacacctgtctttctttcatttttttgtataaaaaaagacatgaagcctcagctccatgcctcttattattataaataaggtacagacccgccgtttatgcgcgactgccccgtttttaagcaaatgttcagaaaacggaagctgtatgggagtcacgccggtattcagctgaagatgagttgacaagctttagttttgacatgatccatacctcctttttccctatattgttccttcatcatataaacaaatcctttttttgtcaatgcaggttttacatttctgccattcgggtattgtaaaacaaaccttttttactgaaaggatgaggccgatgtttcacgcggaccggttgatagcagcttttgacggaagtgatgatagtaaaaaagcgctccaaaaagccatagacctttcaaaaacatttcacgcggatttaacggtcgtacattcccacaatgcaaaagatacccggacgattgttgatccccccaggccgggagccggggcaacgtatatcggcggcgggattgcaagcgttcctgacccgctccaggcggaaagaatctcccctgatccgatgatttatgaagaccgtacggaagaaatcgttgcggaagcgagaatgctgatgaacgacagccagattgacggggatatcgacattttagaaggtgatcccgctgatgccattatcgagcatgccgaccgtatatcggcggatttgatcgtcatggggagccgggaccagaacaggctgaaaaaacttttattcggaagcgtcagtgaaaaactgtcatcgaaatccgatattcccgtgctgatcgtaaaataattctttctgtaaagcagcttaatcaaaagctgctttttttacagctcccggctgtttcttctttttttcggcatcacaaaaaaactcgccatgatcaaaaaatcgatgcacaatacgacagaccagccctttaacagcttgctgagcgcttcggtgcgggaagcgtcctgaatgagaaataccgttccggctaaaagaacgccgccgatgacaaatgctaatacatgtcttccccatccttttgcataatgtttggcataatccagcccgtaccgcttgaccggttttgccccttccttgaccacataatagcggaaccgctcatccgcccattgaatcatgcttttcccgaaggcgacagacactccgatataaatggccgccaccgcatgcgccatagtcgccgccgcccctctgtataaatcagctgcggccgccagaaacagtacggcatccaataaaggaatgagagcgaaaaaaaacattccgagcttttgccgcctgaatatatagcgcgccgccaatccgaagataacagccgcccaaaaagcagcctcacaaatgacaatcaaccaagcaatcgcgttcaatccggttcccccttatcgttttctaaaatgcattgtatcactgctttttatttaatacaactgtattacaaaattgcaagaaaaaatatttcctgttacactggaaccatgcctaaaataatcgatcatgaaaaaagaagaaaacaaatagccgaagccacttggcggacgattttggagcggggaatggaaggagcgacagtgagaaacatcgcccaggaagcgggtctttctttaggcgcgctgaggcactatttcaccacccaggatgagcttttagggtatgcgatgacactcgtaaaagaaaaagcggccgccagaattaacgaagttgccatgaaagatctgccgccgaaagaaaaagcggtgcgtctgatgcttgaaatcatcccgacagatgaagaaacgatggctgaaatggaggtatggttcgctttcacagcttatgccagacataagggagaagagtttcaaccccagcaggacgggatcttggcatatatccgcggtctgattgactggctggatgaaaataagcttctgaaaccgaatcttgataaagagatcgaagcggagaaaatgtacgccatcgccgacggattggcgctgcatgccatgcttgaacctgagcgtctttcaaaagagaagatctcccgtgtgctcgttcagcatatcgaatctctttttatctgactgaagtaaaaaggccggatgtgttccggccttttttcagcttatgactgaaccccgagctcctgctgaatgtgcgactgaaaagcctcctgaatcgttttggctacaggtcccggcactccgcttccgaccggtttcccgtcaagggttacgatcgggattaattcagccgtcgttgacgagatgaaaatttcatccgcatccctgagttcgtcttcggtaagagccttctcccgcacctcaatatcgttttctttcatcagctctaacagtttcatccgcgtaatgccgtttaaaatcagctcatttgcaggatgcgtccggacagtgccgtttatgacggcgtatacattggaagaggttccttccgtgaccgctccgtcccttatcagcaccgcttcataagcgcctgcttcataggctttttgtttaatcatcacattatacagtaaattcagactcttaatgtcacacctcagccagcgtttgtcttccgccgttatggcctgcgctccggctttttgttcattttccggtttttttactgaaaaggtgtatgccgtcgtctgcggttccaatccttcgtcatactggtgcttccgcggcgccttccctctcgtcgtctgtatatagaccccgccgtcaatgagtttgttttcctgtacgagcttttgcagatcccattctatgtcctctgcggagaacggcagggtgatgccgatttctgcggcgcttctgaaaagacgggcaatatgctcacgcagaccgaataaggcgccgttatacactctgatgacctcatacacaccgtcaccgaattgatatccgcggtcctcaatatcaactgccgcttcttcacgatcaaccaactggccgtttactaatgtcttcatgtaaaccctcctcatcgttatctgccgtgatgtgcattctcagctgttattgtcaactattctatcatactgaacgagccggctgcggagtttatttttttcttaaaatcttattattcgacatcttttctatgtcttttccagttttgttcctgtatacttgattcgacatacatatgctgttaacttatggcacttcgcaagcctccgctgttatcggcattatgcagaaacttatgctactggagagattgttatgcgcaacacaaaagaaggtgcttccccttctctgttttcattggcttttaaacttacgagtttagcagttttgtgcggactgcttctggtaatcgtcataatgggatattccgcttccgccgcaaaaaacaaacaggtcaccgtgaccgcaaacgggcagcttcgggatgaagcagaaagcctgcggctgaaaaatgattctcccgacatcttaatgaaacatttgcagagagagcgtgacccagggaaaaaaacggtatatttaaccttcgacgacgggccgtctccatatactgaacagctgttgaatgtattgaaggcaaatggcgcaaaggccactttttttatgcttgaaccgcggatgaaagcctataagcattccgtgcaaagagcgaagcaggaaggaatcgcgctcggcctgcacggcgtgacgcacgataatcacctgttttatcaaacaccgacatcaccgctgaacgaaatgcagcagggacgcgatacactcgaggcaatcaccggagtaaaaacggatcttgtccgcacgccttacggcagtaaaccgtcattgacggatgcccagattaagaatctcgaaaaaggcggattcgtgtactgggactggacgatagacagtgaagactggaagtacaaaaacacacggtacgtgccggaagtattgaatcagctcgcatatttggaaagcgttcatacgagcaggccgcatgtcattttaatgcacgatctgcctgcgacggtgtacgctttgccgagcctgatccaaaaactgaaagcccagggctactcctttgatgttttgacggatcaaatgattcccgtccatgaataagaaaagccggatctgtatatgatccggctttttttatgtcgcggcgctgatccgttttgcaaattcaccgatcttctcatggatgacaagatcaaataaatggtcgcaatatgtcggctcaaggttaatgatcacctgcttcaaaccgggaatccggcccgcatcctcagggacaaaccttgccggcgccacttcaagcgaagtgccgatcacaagaagaagatcagctttatcaagcttttcataaagggtttcaaaatgctgaacgagatcgccgaacagcacgacatccgtttttaatacggtgccgcataccgcatgatcaccgatttccgccgtacattccggcacttcgtccttcagcagatgagaaagcccgtagcgcgctccgcagcgggggcatgcggcggtctgaattgaaccgtgaagctcatagacactgctgcttcccgctttcttatgcagcccgtcaatattctgcgtgaaaatgtctgcctgctttccccgcttttcaagatccgccaaatacgtatggccggcattcggctcatagcttccgctcattttcatctgaaagagctgtttgaatttaggccagaattcacgcggacggcgttcaaagtattccctgctcatcgcttccattctggatgtgtcttcggtccatataccgcccgccgaacgaaaatcaggaatgccggattccgtgctcattcccgctcccgtcagcaccacgatacgttccgcctgattgatcaatgtcataaacgcttccactcttccaccgccttttctttttatcatatcatgaaaaaagaacggcgcctgttatgcccgttctttttctccggaatgatccttcacatgaaccggatcatcgtggcttttctgttttacgaatacattctggcccggataggcgaattccacgccttcctcagcaaaaatatcaataatccggcggttgatatcctgccgcacgtccaagctttccgcccagacgatggtctttgtgtaaaagttgaaaaacagattataatagctgtccgcaaacacgtcaaagttaaccataatcgtatcatcatgcacgccttcatgttcacgaagcatttctctgagccttgtgatgcaccgctctaaacgatcaatcggcgtcgcataagaaacacgaacggaaaacgtgacctggcgcttcgtcatcctcgtccagtttgtgatggcttccatggacagcgttgaattgggcacggtaacaagcgccccctgcgccgtgcggaaccttgtgcttcggaatgtgatatcttcaacgccccccgttacagatgacgtctcgacccagtcgccgatcgtaaacggcttttccgtaatgatgataatgccgccgaaaaaattactgatcgtatctttagccgcaagcgcgaaggccaatccgccaagtccgagtccggccacgaacccgtttacatcataattgaattcctgcgcgatcacactgacgctgagcgcgagaatgacaaagcgcagcaccttggataaaaacggcgccaaaatgtcatccatatcaagctcaaagcgctgattgactttatgaaataaaaacgaagacgccgatgtcagattgcaaagcccccaggcgatcagcgcaacgatcagagagcggtacaattttttgacaatgtccatctgcccgtctaagaacggcgaatactcaatcgccaaaaatagacccagcgccacgaaaaaccatctggccggcttgtcaaacgctacggcaatctgtttgaatatgtcggttttcggcttgttcgccaatttgtaaatgagctgaaaaaagtatttgacaaacagttttctcaaaacgagaaaagccgctaaaattccgatgctgatactgatctgcaaaatatggtcaagcgtaaaaaagctctgaaattgtgtcatcatggcatatgctcctttgtcttgtcgaaaatctattatactaaaacattcggacatcagcttcttttaatgtctttaggcagcctgaaaaaccccggcatcagagcacagccggggtttttcacacattcgttcatctttcagccagatacaacagggtcaggcactatttcttctttgattgtgtctgtttcaggagagtcgctttttggatttcagcatcggtttcggccttaattctttcttccactttcaatctcccttttcccatgatctcgcctcctttttgccattataaatcatcactgcggattgtaaaccgaaaaaagcactatctttattccaaaaaaatactgtttcgcacattcaccagtttgaatcgctgtgcatatacgaatctgatataataacagaaatgcccatgaggggagctgacaagcttgtataccatcgctcatcgcggcgcatccggttacgcgcccgaaaatacatttgcggcatttgatatcgctgcagaaatgaacgctgatttcattgagcttgacgtccagctcacaaaagacggccagattgtcgtcatccatgatgacaaagtcgaccggacgacggacggctccggttttgtaaaagattttacgctgaagaagctgcagtctctggatgccggcagctggtatggggctgagtttaaaggggagcggattcccctgctcgaagaggtcttgaagcgttatcattctgaaatcggttttttaattgaactgaaagggcacgtttctcaagtcggtcttgaaaaagcagtcggccagctgttaagcaggttttccttttccatccgccctatcgttcaatcattcagcctcaagtcaattcagacctttcacgacatgtatccgtccgttccgactgcaataattgcaagacccagcttcgggatgttttccaaaagccagctggccgcctacaaatcagccgtaaattatgtcaatattaaatatacccgcctgaatcggttcttgatttccaccgctcacagacacggcctgaaagtatttgcctggacggtcagaaatcaaaagacggccgaaaaactgcaaatgatggcagttgacggcattgtaactgattttccggattttatttctaaggatggctgatatgaaacaatacatcgcaatttttatcggaggcgcgcttggcgcattgctccgctttgaaatgagcgcgcacattcacagcggttctttcccggcggccactttcctcgaaaatgcggcgggaagccttttactcggtcttattacgggttatttcatcattcgggctaaacgccctcttttgaccgcctttttaggaaccggtttttgcggaggtttcacgacgatgtcaaccttcgcaaaagaaaccatttttctgctgcaatcgtctcccgcatcggctttttgttatgctgccgcgacattattcgctggtcttgcccttgcatacgccggcattttctggggacggcggattgcccttcacgcagcgggaagggggcatgatacgccatgacgattgtcctgatgcttatcgcagcgggtatcggagcggtattacggtctctgctgggtaaaacaatttcagaaagaacaaaaggttttccgatgccgcttggaatggctgcggtcaacctgctcggctccttcggcctcggcatgttcaccggcctgggtctggataatccttccgccggcatcatcatcgcgacgggctttttcggtgcgtttacgaccttttccacgttcagtattgaagccgtgcagctgatgatgaacaatcgcataaaggaaagcctgctctacatcgctgtttcagcagccggaagccttttggcgttctggtgcggctttgttatgatatccatttaaaaaaaccttgagcttatttttcgctcaaggttgcgttatgaagcatgaccgtttcaggcacggggagctggcggtttattgttccctgaccgcccgggcggccctgttcttctttgagttcaagctgtttaataaaccggccgtccatttctaatatgagggcagtgtatcccccgatttgtatcgactcacccgcacagatgtcaatattccgtttcagcacaagaccgccgatcgtgtcgacttcctcttcaatccctgcgccgagaagatgattcacctgatcaatccgaacctttccgtccagcacataatggcgttcggacagcttttgaatctgcggctgttcgtcctcatcaaattcgtctctgatatcgccgacgatttcttcaagtatgtcttcggtcgtcacaagaccggacgttccgccgtattcatcagacaatatcgccaaatgaatccgttctctctgcatttttatcagcaggtcgtgtatcgggatcgtctcgatgacttcaatcaccgggcggacgtaagacgtgatggatacttccgctttttcatcttctgtcataaacagcagatctgaaaagagatgcttcgtattgatcatgccgatgacactgtctttgtccccgtccgttacgggccagcgcgtatatttgtctttcagcatcatctcaagcatttccggcacgtccatatcagtggaaacagccgcgatttcttttctcgggatcatgatttccttggcgatccgattatcaaaatcaaaaattttattcacaaatgtatattcagacggattgatttctccgttttttaaactttctgacagcaggatccgcagctcttcttcagagtgggagccttcatgctcagatgccggctttaatccggccaaaccggtcagaattctcgcggagccgttcagcacccaaataaacgggaacatgaacacgtaaaataaccgaagcggtccggcaatccataacgtcagcttttccgctttttgaatcgcaaccgttttaggcgcaagctcaccgacgacgacatgcagaaacgtaatcagcccgtacgccgcagcaaaagcaatcacatgctcagcagaatccggcagccccatgccctgaaacaaaggatgaagcatccgttcaaatgcaggctctcccagtacgccgagcccgatggatgtgagtgtaatgccaagctgcgaggcggataaatactcatcaagatccgtaatgatacgctttgcgagcaccgcccgtctgttcccttctgaaatgagctgatcgattctggatcttctcactctgacgatcgcaaattcactcgccacgaaaaatgccgttaacgcaatgagcacaccgattaaaatcaaactgtcaatatcgtccatttcaccttatcccgaattgaaggataaggacgtcacctcctgatttcatcgttttttcttaagcgagaggaacgaaatggatgattgactacacagagggccccatcctgccacctcctaagtcaaagcatgattgtcatttgtatagtttattgtatcacaactccattctttcatcattttcagatttttatcatataaaaaacagccttcaaaaagaaggctgccgttatctgcttcggaaatgattttctaaacaaagcgccgtattaatccccccgaatcccatgcttaagcttaacgcatggtgtacggtatgggcgctcggcccgtcggtcacccactgaaatgaatcgtcaatcggctccgttaagtttcggatcggatgaagcttgttttcccgcatttgcaagagagcagcaatgatttccaccgttccggccgcactcagaccgtgtccggtaatcgattttgtcgcattaatccgcgcgtgcgacaggccgctttcagaaagcgcccggcattcagtcttatcaccgatcggcgaaccggtgccgtgcgggttgatgtaatcgatctcttttgctgaaagaccggcccgctccagcgcctggcggatcaccgtcatttcgccctctgctgaaggattcgggttgcggttcgcatcggaagccattccccagccctttaagccagcccacgatcgtgcgcccctctcttcggcacattcagcgcgttccagcacaatcgccccgcacgcctctccgaatataaacccgtccgtatgccggtcaaacgggcggcaggcggcttcaggccgttcagcgtatgtatcagtgcccatcgctcccaaagaacggagagcatgacactccatgtacgacagatcggccagcgccccgatcacgatgcaccggtcaaacaggccgcctttgattccttgagcagcctgaataaccgccgcctggccgcttgccgacgcgccgccgaccgtaaaggccggcccttttatcccgaattgctccgtacaaagccccgacaaatcactatccataaaagaaagcccgtatgtcggatttacaaattgcggcgtttcaccgtttttctcaaaggcctgcagcaattcgcgctgcgtcatattcgagccgccgatgatcagaccggtgcggctgtgatcagcgccgtctaattgagcgtcatgccacgcttcatataaagcgataagcgccgtctttcctgataatgcggcccttcggtacaagcgcttcgacagcgcgtccggcggcgttaattcgctaagctccgcgccgataaacgaactgcctttctgccggccgggccgtttcatcacatcaaaggcgtgccgcccctccataagcgcatcgagaaacgcctccttgccttgtccgaccgcggttaagactccgattcctgtaatgctgatgtctgacgtgccattattactcctcgacatttgtccgttctcccatctttatgtattggaagctatgaagaaaaatcttgatacagtgctttgaaaatatcgcgcgactgtctgatctgttctgaaggcacgctgaaagataatcggaaatagccgctttttccaaatccgctgccgggtacgatcaatagtttgtatttctgtgcggcatgaatgcagaacgccacctcgtcttcaatcggtgatttcggaaagacgaaaaagcctcctttcggcatttcaaattcgaagccggcttctgtgaggatgtccaccataaggtctctccgctttctgtaaggttcagcgtcaatcgaaagatcatccattttcgccacggcacgctgcatcatgaccggagcgttcacaaagccgagcgtccggttgcagaaaacgaacgcatccgtcagaagatcgccctcaggcatttgggcgtctgccgcgatatacccgagcctttcccccgcaatgccgagatctttactgaacgaactgactaaaatcacgcggtgatacgcctgaaacggattcgcctgctcttctccgtagatcagctggctgtacggttcatcaaataaaataaatatgctttggccgttccgctcttcggcttcttttaataaggcgcccaattcgttaaggtttttctggctgagcacagtccccgtcggattatgcggcgtattaacgatcagtcctttcgtacggggggtgatcgcacctttaaccgcttcaatatcaatctcaaatgagtcagtcagcgggcagatgacgggtctgccgcggtaattttcaacatacgctttatattccgcaaaataaggcgcaagaaggatgacttcttcctcggggtttaaaatgcttttcagcgcgacattcagcgccccgccggctccgaccgtcatgactgtatgcctggcggaaatttctgtctgaaaccgctctgacaaaaagcgcgcaaccttttctctcgcctccggaagcccctggttttgtatgtatccgtgccgccctgtttcagccgcttcgcaaagcgcctttttaaatgtttcaggcggctccgcaaccggatttcctattgaaaagtcaaacaccttatcggcgccgaactcttttttcagccgagcgccttcatcaaatagtttgcgtatccatgaacctttctccagattctgtgtcacttcccgtgataaaccggccactgtcatctgtcccttctgtctttttcttccgtttctatttacaatgattatgaaagatttacatggcgcagtcaacgctttttcagacagcccgccgcgccgtttcaggagaaagacggaaaacaataaacttgtgcaaactccccttcatatattaaactattctcataactataacgtgatggttggggagggatttagatggggctgagacttatcgcatcagtgaattagcagagcttgccggtgtaacgaaacgcacggtggattactacacaaacctcgggcttttaaagcctgacaggtcttgttcgaactatcgttactacgatacacttgcacttaatcggttaaagtttatagtcgcttgtaaaaagcagcgattggccctgtctgatataaaagatcgactggagaaccagtttccctcttcagccctgcctgacgatattggaaatctggcatcggaaattgatcacatgaatcaaaacatctccgtgatcttgaatcggtttgaaaagcttgaaccagaggagcgcgcccagctgaaaaaaaggctggctcctgaaaagcttgcagtgcttcaatcatttatgctgctgttaagttaaaccattatcttactaacaggaggtgttaccttcatcttcccaaaaggagtgaaggttctaattggacattgtgaatttgattttagtcgcggttttaatcgcgctgacggcatttttcgtagcatctgagtttgcgataatcagaatcagaggctcacgggttgaccagcttatagcagaaggaaataaagccgcaatcggtgtcaaaaaagtgaccacgcatttagatgagtatttatcggcgtgccagctcggcataacattgacttccatcggtcttggtgtcttaggcgaatcaacgattgaacgcttgcttcatccgcttttcacaaagataaacgtaccaagctcattatcgcatattatttcatttattctcgcctatgcgatcattacattcttacacgtggtcgtgggagagttggcgccgaaaacagtcgccatccagaaagcggaagccgtttcaatgctgttttcgaaaccgctcatttggttttaccgcatcatgttcccgtttatctggcttctgaacaactccgcccgtcttttaacgaaggcgttcggtcttgagacggtgtctgaaaatgagcttgcccactctgaagaagagctgcgcatcattttatcggaaagctataaaagcggtgaaatcaaccagtctgaatttaaatacgtgaacaaaatctttgaatttgacgacagacttgcaaaagaaatcatgattccgcgtacggaaatcgtcagtctgccgcatgatatcaaaatttctgaaatgatggacatcattcagattgaaaaatatacccggtaccctgtcgaagagggtgacaaagataatattatcggcgttattaacattaaagaagtgctgaccgcctgcatcagcggcgaagtatcagtcgactcgccgattaccgattttgttaatccgatcatccatgtgattgagtcggcaccgattcacgatctgcttgtaaaaatgcagaaggaacgggttcatatggcgattctgtcggatgaatacggcggaaccgcggggcttgtcaccgttgaagacattattgaagaaatcgtcggggaaattcgtgatgaatttgatatcgatgaaatcaacgaaatccgtaaactcggcgacggccattacatgcttgacggcaaggtcctgattgatcaagtgaacgaactcctcggcatccatttggaaaatgacgaggtcgacaccatcggcggctggttccttacccagaaatacgacgtcgaacaatacgactcgattatcgaagaaggctgtgaatttatcattaatgaaattgacggccaccacgtcgcatatatcgaagtgaaaaaactggcgtttgatgaactgctggaaaccgccgaacaaaaagaagcataacaaaaaagcttgcgcgtctgatacagacggcaagctttttttcatttacagttgttcaagttttttctcaagctctttaattctggcattcagctcttctgtcatggccgcaagcctctccttcggcgcaagatcggaaaagtcctccaaaaaaatcggctcgccgatgataagccgcatttttccctttttaaacagcgcttttcccgtagacggccctttatatgcggccggaacgagcggcgcttttcccatttgggcgatggtcacggcccctcttttcagcgggacgtcttctgatgttctcgtaccgctcggaaaaatcccgacaatctttccttccttcagaagcttaatcggcgttttaatgctgctcgggcccggattttcacggtcaaccgggaacgcgtgaatcttcttcaaaaaacgtccgatccactttttctgaaacagctcttttttcgccatataatgaatctgatggggcaatatcccgacaccgagcgtgaggacgtccacccagcccgcatgcgtgcacgcgataacgaatcctttatcagacggaagattctctttattgtacactttcactcctccgcgcagggatagaatgcatttgatggcatttgcacaaaacttatacataacgcacttcctttgttgtaatgatcaaaagtgttctctctctctattataacaatattttttattacctggtactaataattatatttttcctccgccgatctctatcttttatgacggattttgggtactatagagaaatggtgtttgatgaggtgaaaatgaatttaagccgtttgcatggaacgtgcaactttaaacctttcttatgcgtgtataacatagaggggagaaaaggcagtgacgatcgatgaaatttaccaaatgtatatgaatgatgtttaccggttcctgctctccatgacaaaagacaagcatctcgctgaagatttgctgcaggaaacctttatgagggcatacatacacattcactcctacgaccacagcaaagtaaagccatggctttttcaagtggcgagaaatgcgtttatagattatgtcagaaaacataaaaaggaagtgaccatttccgatgacttaattgggagccttttccagacggctgttcaaagcccggctcatcagattgaaatcaaggaagtgctgacagggtatatgtccgaacttcccgacaattatcgggaggccttaacactgtattatttaaaagaactgaattacaaagaagcatcccatattatgaatatttcagaggctaattttaaaagtgttttatttcgtgccagacagcggctgaaagcactttataatagaggtgttaatgatgaatgaagaatttaaaaagcgtttttaccaatacaaaaatggagaaatgagcgaccgggaaatggccgcctttgaagaagagctggaaaagctggaagtctatcaggagttgattgaaagcgaaatgcaggacgaccgggaatgggacgtcggcatcagcccggaaaaacagaaggccattttatcatacggaaaacgcaaatcgtatttgcggatttcagttctcgccgtcatctccactttgatgattttgccgctttgcacattaggaagctacctctattacggtctggggggaaaagaaagcaccggcaatcaattaatggagaccgcggcagtgacggtggcgaccacaatgccgaacgtcctcgtcgatacctccggactgaaaagccaggtgaagctgtttggaatgaatacggaatttccgctgcaaaagcagatcggcacaaaaacgaaatccgtcggcggagaacggattgaaatgtttttagatacggtcaaatcgcctgccgttaactactatgatctagacgcggcacaggcaaagcattatttcgcccatccttccggcttaaaggaacgcacgattgacaaagccggacagacattaaaaaaattgcctgaaggaagcgtggcggaggtctatctttcttatgacagggcctatccttcttctcaaatatattcgacttttaaaaaatacgatgtgaagtttttatggaacgcggtcgaaacggagaaaaatctgaaagacagtccttatgccgagccgttaggatttcccgggaaagattccaagatggtgtcctctttcgaaacgcaaggacagacagaccgtgaacaatttatcaatgcccttgaatttatgtcccgccataaaaaatgggcgcatgcaatatcgaaacgcaaagacatgaatcttggcagccgaatcgactatgttgaacatcacggaatgaacgtatacggctctgtcgtgacggggccgacaaaagaaatcgaacgtctgctgaaaaacaaaacagtaaaagcagcaaacatcggtgaggtggaattatggaattggtaagaatttttaaagagcataatgttttcggctggatatcagtcggtaccgcgattttgtcgctgctgcttttgaacgtggcaatcatcagcaatgtgactttctattcttatcagatgctgccgtttgcgatggccgccgtgccgttcggcatcattgagctgtttattaaaaaaggacggacgggcccgggactgctcggtgtcattctcaatctgttcgtcattgtctgtgtatatacgatcgttgcggttgatacgaatctgcaattcggtttttaaacataaaaacaggcccttttacgggggcctgtttttttaaaatgaaagaacgccgattaaatgcagcaatacgacgatgatagccagcggcacgagatatttcagaaggaaataccacacctgaaagaaacgatagccgatggcggaaccgcttttcatctcggcaaacagctcctgcttcggtattttcagcgggacgaagattgatattaataaagcgccgagcggaatcagcacattgctgacggtgaaatccgcaagatcaaaaaacgtttttccgaacaaatgaacatcaccgagaacaccgtatgataaacaggacggaattccgactaagaaaatgagcagaccgcttgtccacgacagcttctttcttttcgtttcatcacctttcccgacagtcgccacgataatttccaccatcgaaaaggccgaagtcagcgcggcgaagaaaaagaccgccaaaaagctgataaaaaacagcgagccgaacggcagccggtcaaacacagccggcagcacggtaaacagcagtgtaggcccttcatccggtttaaagccgaacgaaaaaaccgccgggaaaatggccagtcccgcaaacagcgtaacgagcacattcatcataacaatggaacccgccgaacccggaagattttgggttttcggcagatacgaactgtatgtcaccatgaccgaaacaccgagcgttaatgtaaaaaacgcctgtcctaaagcatataggatggattccggcgtcaaatcttcaaagtgcggaaccaataaaaatctaatcccctcaacggcatgatcgagcgtgactgatcgcagcacaagcaatagaaacagcacgaataaaatcggcatcagcaccgcactgacacgttcaatccctttctgcacgccttttgcgacgaccgccaccgtcatgatcataaatacaagctgcgcaatgagagtctggatcggattttcaatgaccgtcccgaacaccgtgccgtactgctcctgagtgagcccggataaagaaccggtaacggcttttaacacataaagcaaaatccacccgccgacaacactgtaaaaagacaaaactaaaaaacaggccgccacacccacataacccgtgaggtgccataccgacttcggcgcggcttgtttgtaggcatcaatcgcatttgtctggctccgtcttccgaaaataaattcaccgagcaaaagcggatagcctaaaagcacggtaaagaggacgaatacaagaaaaaaagcgcctcccccgttcgtacccgctacgtaagggaacttccaaatggctcccaggccgatcgccgaaccggcagcggccataataaatcctatttttgaggcccattgaacccttttttggtcagacacgactttccacttcccttccgccctatattatcccttattcgctgcgataacttaagcccatttcaatatgtttcattattccgaaaaataaaaaggagcggcgggtgccgctccttacaaatccccgtttaatttcgaatgctttctcgaatataagaaataaatcaccagaccgatgatcagccagataaagaaacggaatatggtggttgcgccgaggttaataatcaaaaacacgcagaacagaatggacaatatcggaataaagggaacccccggacatttaaaagcccttggcagatcaggctgtttctttctcaatacgataaccgccacggaaatcaggacaaatgcggcaagcgtgccgatgttcaccagcttcgccagttcatcaagcgggacgagcgagccgagtaatgccgacaggatgccgaacacccacgtcaccacgtgcggcgttttatgcttcggatggacttttgaaagcgcccccggcaccaaaccgtcacgggacatggcaaacatcaccctcgtctggccgtacagcatgacgagcatcaccgttgtcatccccaacactgcgccgatatcaataattccggccacccaattctgtccggccatctgcaggacgagagacacgggatggtcaacgccttcaaagcgggcaaacggaacgacgcccgtcataatcgccgatacggtcacatacagcacggtgcagacgattaatgaaaagataattcctttcggcagatccttcgccggatttttcgtttcttcagcggcggaagagacggcgtcaaaaccgataaaagagaagaaaacgagcgccgcggcactgaaaacaccgccgaaccccatcggtataaacggctgccagttgtgaggtttgacatatacggccgcaacggcgataaacaatagaacaaccagaaccttcaaaatgaccataatattattgacccgcttcgattccttaatgcctaagtagagaaggaatgtaatcgcaagcacgataacaaatgcggggagattaaagaatgtgaccgtgcctttaatagatcccggcgcggccgttaatgcggtcggaagatgaatgccgaagcccgccaagaatgattgaaaatagccggaccacccgaccgaaaccgcgctgacggcgagcatatattccaagattaaatcccatccgatgataaacgcgagaagttcacccagtgtcgcataagtaaacgtgtagacggaacctgaaaccgggacgcttgaagcaaattcagcatatgacagagccgcaaataaacacgcaagagcggcgatgacaaatgaaacggtcagccccggccccgccgtgacagcgcctgttccggttaatacaaaaatccccgttccgatgatggcccctatccccagaagggtcaaatcaaaggcccctaactctcttttcagcgacttttccccgctcgttgcggcaagcaggtcctgaatgcttttctttctgaatacgctccccttcatctgcttcactccttgtaaaccaatatatgttagaatattcagataacaatagcaataatgactaaattcttatttttcgcatgaaatgtttcagcacatcattcctttctcctatgtcatattatagcgaaaaatataaaaatgaaaataacttttttgaaaattctatatattatttttagttttcataaaacagaactcagcggattctccactgtgaaatattaacattagtgattcagctggcgacttccattttttgaaaatcgtattcatatgtacgttcaaataaaaatcccgccctttttaaaagcgcgggataagacttgcgtattatgttgaaataaatctgccgccatttacgtgaatggtctgccccgtcatataggaagattcgtctgaagccagaagcacgtaagctccggcgtgttccgcaggctgtcccggtcttcccatcggagtgtccaaaccgtgcttttccaccttttcttcagtaaacgttgccggaatcagggcggtccagatcgggccaggggccaccgcatttactctgatcccctgatcggccaatgacatcgccattgaacgcgtaaaggaaacgatgccgcctttcgtgcatgaatagtcgatcaatgatgtgtctccctgataagcggtaatagacgttgtattaatgatggcgctccctcttttgagatgaggcagcacggcttttgtcatatgaaacatagaaaacatgtttgtacggaatgtcttctccagctgttcagctgtaatatcaagaatcccgttttgcggatgctgctcagccgcattattaacgagaatatctatttttccgtagtgatctaagacttggcggaccgccttttgacaatgcgcctcatcaccgacgtctcccggaattaacaggcattcggcctggtattcttccgcacgctttttcgttctctcggcatcggcatgttcgtctaggtacaggatggcaagatccgccccttccttcgcgtaagcgatcgcagccgctgcgccgatgccgctgtctccgcccgtgatgacggcgacttttccttttaatctgtccgacccttttacatccgggtcctccaagaacggtttcggctccatgtctgattcaataccgggctggcgtttttgcacctgcggcttttgtccttccgtctgtctgtccatcggattcatattctcacactcctgcaattggtattactgagacgataccacgcagtgcggggagttaaacggacaaatatgccggtaattaaagctgctgagccgtttcgggaaaagcgccggtgtatttcgcagacggcctgtaaatcatgttgtcagcggactgttcaagcacgtgtgcgcaccagcctgccattctgcttgctgaaaaggtcggcgtaaacaaatcattgtcgacatcaatggcctgcatcacagccgctgcgtaaaactccacattcgtatacagcttccgtccgggcttatattgctctaacaggcggatggcttccttctccacataaagcgccaagtcaagcgacggatcatttcccgccacttcttcagcctttatgcgcagcgcttccgcccgcgggtcttttgttttgtacaccctgtgcccgaagcccatcaggcgttctcccctcataagcttcgctgccaaatacgcttctgcattttcttttttcccgatgtcttcaagcattttcgtgacgcctgaaggcgcgcctccgtgcagcggccctttcatcgtacccagtgcggcagtgacggcagacactaagtccgattcagtcgaagcggtgactctcgctgaaaaagtcgatgcattcatcccgtgctccatcgccagaatcatatacgtttcaagcgctttcttttgggctgcggacggctgcctgcctgtcagcatatacaaatagttttcaacgtgtccgtatcgcgcctcaggtgacaacgcttcctgcccttgtttacggcggtatctgtacgcaataatcgtcggtgtgacggcaatcagtttaatcgcttcttccggcttgggcggatatgtaaatgaatctgtgcccaaacctgaaacagccgttctcagcaccgccatgtcgtccatttcatccggaagcgtttccagtaagtcgatcaaatgtttcggaagcccgcgctcggctgcaagttcttcctgaaacgcaagcaattgccgctcatcaggaagcgccccgttcaaaatgagatacgccgcttcttcaaaactgaattgcagcgcaatatccttcgcatcatagccgcgatatattaaatgccccttttctccgtcaatgtggctgatagccgtttctgcacaagtaatccctttcaatccacgataaatcaatttcattcccccttatcctctttctgttattatagtaaatataatatttaaaaaataatgaatatttttaagggaattaattaaaacttttaatcagaggagtgcatctatggattttaaatggcttcacaccttccttcgtcaccgcggcaaaatatgagaatttcagaaaaacggcggaaacgctttttttatctcagccgaccgtcaccgttcatataaaattattagagaaagaaatcagctgcaagctgtttcagcgaagcggccgaaagatacaattgaccgaagaaggaaaagcatacgtgccgtttgccatgaggcttttggaagactatgaaaacagcatggcggagctgcacagggtgcgccagggctactcgcacacgctgacactcgctgtttcgccgcttatcgccgacaccgttctcccgtctgtcatgaagcgttatacagaggacaataaagaaaccgaaatgacggtcaccattttcgaatcggaagaaatcgcctctcaaatcagaaacggctcagccgatatcggactgagctgcttaaaggtgcaatcatcttccctcacttgccgctccctgtacaatgaccccgttgtcctcgtcgcgccgcccggccgaaaacccggaacagggaaggccgatgaagtgaaagacctgttcggacaatatctgcttttgacccataaccatcctgactattgggatgatttgctccgccaggtcagaatacagttccctttcgtcaggacaatgaaggtgacacagacgcatattacgaaacgatttattaaagaggggctgggtgtctcatttctgccgctgtcagcagtacgggccgaactcgccgcaggcagcatgattgaaattccgtgcgaattcgcccagatgccgagcgcgggcgcgtacgccatcgccctctatgaaaatgaaaaaaagaaaacctttttagattttttatcacattttcatttttaggtgaaacaaatggagctctgtcccgtctaaataaaaaacccgttctgatgaacgggtttctatcgctgctagaatcttttcgcgccaaggtagcgcggtttccagtagctgttattcagatcacttgttgtgacgccgtcagaaccggcatggatgaacttgttgtttccgatgtacacacccatgtgtgaagggccggcctgatatgttgtaaagaagacgaagtctcctcttgacgggctggacacgctcttcattgagctccagtatcccgcagtgctcgttctgccgacactcgtctgtttgtttaacaggtaccagataaatccgctgcagtcaaagccggaagtcgttgttccgccccatacatacggcgtcccggttaaagattgcgcatcagaaatcagcttgtttacattcaggctcgtctgtgcagcattatggctggatgaaggctgctttgatgacgaagatcctgaagacgttgaaccggaagttgatccctttactttaagaacttgtccgatgcggatcaggtccgtttttaaaccgtttaaactttttaattggtttaccgtcattttatatttattcgcaattttccaaaggctgtcgccttttacgactttatatgtagacgatgatgacttgctgcttgagcttgaacctgaggatgatttaccgttaatcgaaagcgtctgaccgatgtaaatgatatccgattttaatttgttctcagatttaatggaattaattgacgttccataccgatttgaaagtccccataatgtatcgcctttttttaccttaatcgtttgcgcagatgccgcgcccgcaaacaaagtcgtccccaaaaccactgccgttgttgctgtaacaagttgctttttcatattttcctccctgaatgattctatctattttatgtgtctcttttttaaagtttttatctgtttcctattataaggttcaatttccactagaaatagacttgacttcccgtgacaaatttcttactaattcgttttagaaaaaagtttttaagggtattaaatatttcaatttgatttcaaacgtgacgaaaaacgagtctatttgtcatgtttttttcctgtgatcctcgtattttggaaaaacaaagcagtttattttccaaataaccccttgttaaaaaaatcctcgactttttcaaaaaagtgaatggttttcactctttcttgaaaacataactttacaccggaatttacatttctaacaatgtttcacctgaaatttacaggaggaacaggcgctctttacaaacaccccctaccattagacatgcagacacgattaaaggaggacgagtgagaatgagtctatttaaacaggttcgatcaaaacttctgccggcggcagccgtatccgtgctgacagccggtctgattgcgggcgcggggcttcagcactccgaacaggctgcggcaaaaaaacagcctgacaaaaacgaaatcagaaacgtcatcttcatggtcggcgacggaatgggcgctccctatatgaacgcctaccgttcggtcattaacaaaggaaagccttcggatggtatgaaactgacggcattcgaccccaatctcaccggtatgatgatgacttaccctgacgatcctgattccaatattaccgattccgcggcggcaggcacggcaatggccacgggtgtgaaaacgtataacgcggcgatcggagtcgataaaaaaggaaagcgggtaaaatccgtcctcgaagaagcgaaacaaagagggaaatccaccggacttgtcgcaacttcggagattgcgcacgccacccctgcggcattcggagcccataacaaatcccgaaagaacatggatgacatcgcaagcagctactttgatgaccgcatcaacggaaaacagaaagtcgatgtgctcctcggaggcggcaagtcaaactttatccgtaaagaccgcaatgtaacaaaggatttcaaaaaagcgggatacagctacgtgacatcaaaacaggaactcaaaaaggatcgtaacaagaagattctcggcctgtttgccgatggcggactcgacaaagcaatcgaccgctcaaacgccgtcccttcattagaagacatgacaacggcggcgatcgacaggctgaacaagaataaaaaagggtttttcttaatggtcgaaggcagccaaattgactgggcgggacatgacaatgatatagtcggcgcaatgagcgaaatgaaggattttgaaaaagcgtataaagcagcgatcgcatttgccaaaaaggacaaacatacgcttgtcgttgccacggctgaccataccaccggcggattgacgatcggcgcgaatgacgataaaaactggcatgttgaaccgattcttgccgccaaaaaaactccggcatttatggctgaccaaatcaaagcgggcaaatccgtatcttccgtgcttgcgcgctatacagacctgaaatggtcaaaagctgaaatcaaacagatcgaaacggccgcaaaacaggatgctgacaagagcatctacaaagcgatcattaagctctttaatgcgaaaaccaacagcggctggacaaccggcgatcatacaggcgaagaagttcccgtttacgcatacggtccgggaagagagtcatttacggggcttttaaacaacacggaccaggccaaaaagatctttcacatcctgaaacacggaaaataaaaaaaggatgcgggggtttccccgcatcctttcttcttttacagatatctccggtgcactcctttgccgtcatacgaaaacatcacttctctgtcttcaagaacagattcgatgtgcacgctcctgccccacagctggtacagatacggcagcactttctccaaatatttcagatcaagctcaattccctcataccaatgtttaatataaagctcattattcttcaggtaatccccgtcattgacggtcagataaggaaatcccccgttgacccgcatgttcacgagctggtcgcgcacggccttccattctttgtcgatcactttatagtccctgccctgcttttggaataaatacaaatcctcacgcatcacgagatctttcgtcaaataattgcggataaatgatatatccgattcaatttccctgacctcaaacattttctcgcgtccggaaccgggctttactcctgtttttttcatttcatctgtcgggttgtcataacgctcttcgatgtcttcaaaaattttcagccctaaataatacgggttgattcccgtttttgacggctgaacgacgcctgcgttcagcttcgcaaattcgatggcttcatctgaagtcaggtcaagctcgcggataatccgctgatgccaataggatgcccagccttcgttcatgattttcgtttccagctgaggccagaaatacagcatttcttctctcatcatggttaaaatgtcacgctgccacggttcaagctcccgcgaatgttcctcgataaacagcagaatatctttttccggccggggcggaaacggttttttcccttttttctttttcacctgcttcggcttatccattccccataaatcatcgtaaggcgatggcgcggtttcttcttcgtcctcctcttcgtcatcgacgctccacagcagcttcggcctgacgagcgacggatcgatatgctcctgaaccgccagaatggcatctaaaaaggactccacctcttttatcccgtgcattctttcataatgcttaatccgctccgccgcagccgccatactctcaaccatgtcccggttcgtattttgaaagcggcagttatgtttgaaaaaatcacaatgggcaagaacatgggctacaattaatttattttggatcagcgaattgctgtccagcaaaaaagcgtagcaagggttggaattaatgacaagttcataaattttgctcaaaccgagatcataatggagtttcatcttgtgaaattgtttgccgaaactccagtggctgaatctcgtcggcatgccgtacgcgccgaatgtataaataatctcagccggacaaatttcatatctcatcgggtagaaatcaaggccgaaacccttcgcaatgtcggttatttcctcaattgcccgctgtaaaccttttgtctcctccgcgttcaaccgaatcccccctacttggacttatttataatgtatgacccctcctctcaaaagatgaaataacagaccggtttccggctgaaaactttcggcacatccgccccgtttgctttatatgtaagtgggtaaaacacacaccataccccaaaaagaaaaggagcgattctacttgaatacagcagacatgcttacgacgtatctcagcaaactcccgaatctgatcatcgcactgctcgtcctgcttatcggctggggcattgccaaaatcattgaaaaagccgtatacaaaggcctgcaaaaaacaaaaatcgacgacaggctgttcgccgaaaaaaagccggcgcgctattcctcagaaaaagtcatcagtaaagtcatttattttatcgcattaatcatcgtttttattctattctttaacattctgcatctgacaaccgtggcttcgccttttgtcagcatgctgtcagcgataacggcggctgtgccgagcattttaaaagccggcctgattctgctgttgggctgggcggccgcttcgcttttcagctatctcgtcaaaaaagcgggcatgaaactcgctgaaaacggccggctcagaaaatggacaatggtgtctgaagaagcggagatgagcagatccgttacggccgcttcacgaatcgttttttacttcgtcttgctcttgttcctgcccggcgtcttggccgctctccagatcagcggagtatcagggccgtttacaaatatgatccaaagcgttttgtcctttataccgaaattattcgccgcggcgctgattgttttaatcggctggcttgttgcccgtctcgtccgtgatatcgtcacaaactttctggcgagtatcggcacggaaaggctcgccgcacgtatggggctttctatttatctgaaggatacaagcctgtcggcaatcatcggaacgattgtctacgtgctgattttcattccggtgatcatttctgcgcttgaccggcttgatgtggcgggtatttctgaaccggcgtcagccatgctgcacacggtcttcacaatgctccctaatatcatcatcggtatcgtgctgatcatcgccggcatctggatcggaaaatgggtcaacagcattgtatccgggctcctgcaccgggccggtttcgactctcttctcggtaaaatgggttttgaacagacgggtaccccgaagctgacgctttctcagacggtcggcatgattgttcagatcatcatcgtcctgctctttacggcagaggcgctgcagcttgttcatctcgaatttctcgtcgttatcgcaaccggtattatcgcttacctgcccaatgttctggccgctgtatttattctcggaatcgggcttttggccggacagctcgtcagcaggctgcttgccggcatgctgagcggaaaggaattcagattcctggcgccgcttgcgaaatataccattatcactctttcaatctttatggcgctggatcagctcggtgtcgccgacacgatcgtaaatgccgcgtttattctgattctgggcggtttcgcgcttgccttcggactttcattcggtcttggcggaaaagaatttgcctcccgttatctcgcaaaattggatcgcaaaattgaaaaacatcaatcggctgacgatcgtaagccgccgatgtcttaacgaaaaaaacgtgtgctcagaaggagcgcacgtttttttttgagttaagggggcaaattccttttttttcattttagattcatatatgatagactgtaacagaagcaaaatctcttttttcgaggtcattctatgaaattaacgaactataccgattattctttacgcgttttgatttttttggcttccagacattccgacgaactttccaacataaaagaaatcgcagatacttattccatctctaaaaaccacctcatgaaagtcatttaccgcctcggccagctcgggtatgtcgaaacgatccggggccggggaggcggaatccgtttaggaatgacaccggaagacataaacattggagaagtcgttcgaaatacagaagacgactttaacatcgtagaatgctttgactccaaaaaaaatctctgtatcatatctcccgcctgcaacttaaagaaccttctgaatgaagccctgcaagcttacctggccgttttagacaaatatacgttaagggatctggtcaaaaacaaagaggagattatgagactgctcagaagctgaaggaatgcccgcattccttctttttttatgccggcataagaaaaaaggactatttctattaatatgataaacgattgcagacaagtgccgatataaagattatcattactgatatcctcaccttgcgtatgcaacgaatggggatagtaaaatcatcgcaggaaaagggagattcattatgaaaaaaaaggtagcggtcggtttgactgcatctgcgatcgtcgggtctgcgttagctgtaacaccggcagaagcacaaacgattaaggttaaaagcggagattcattatggaagcttgcccaaaactacaatacaagcgtggatgccattacatcagcgaatcatctaaaatccaccgttatttctatcgggcagacgctcaacattcctaacggcaaatcagattccggcagcaaaaagccatcttcaaagaacagcggcacgactaaaagcgtttatacagtgaaaagcggagactcgctgtggctgatcgcatctgattttgaaatgtccgtacaggaactgaaaaaattgaacggtctgacaagcgacttaatccgcgccggacagaagctgcaagtgacggggaaagtttcctcaagcaccgatcagaaaaaaaccgctcctggcagcagctcaaacaacagcaaaaagcagtcatcatcttccgggacgtataaagtcaaactcggcgattcactatggaagatcgcaaacagcgtcaatatgaccattgcggaactcaaagtattaaacaacttaaaaacggatacgatctacgtaaaccaagtcctgaaaacaaaaggaacgtcttcttcgggaaacacgccgtcaaaggacaattcaaaccaaaataaaaaccagacgcaaacgtcctcctatacagtaaaaagcggagactcactctggaaaatcgcaaacgcatacaatatgacggttcagcaaatcagaagcatcaacaaactgacgtcagacatgctgcgggtcggacaagtgcttaagctgaccaaaacgtcatcttccggctcttcgacttcaccgtcaactccgaaccagtccggaaatacagggaaaaccactacatataccgtgaaaagcggggattctttatgggtgattgcccaaaagttcaatgtgaccgcccagcagatccgcgagaaaaacaatctgaaaacagatgttcttcaaatcggacaaaagctgacgattaccgggcagcagacaaacacaacaccgaatcagtccggcaacacaggcggcacaggttcaacaagcgcgaagattaatgtaatgatcgatgccgcaaaagctcagctgggcgtaccgtatgtatggggcgggacgacgccgagaggctttgactgcagcggtttcatttattacgttctcaataaggtcacttctgtatccagactttcagccgcaggctactggaatacgatgacatcagtcagccagccggcggtcggtgactttgtctttttctcaacttataaagccggaccttcccacgtcggtatttatctcgggaacggccagtttattaatgccaacgattcgggtgtcgttatttccagcatgaacaattcctattggaaacagcgttacctcggcgcaaaacgtttcttctgatatctgacaagctgtacggcctcaattaggctgtgcagctttttttacagtctgaaaatattaatgctgatcacatgttttgtcacgggatggaaatacacttcagcacgggatgaaaacgtttcttttgttgtttgcaccgttacgcgaaacacatctttcgtctgttcccggttcacttttgtacggcccatgtacgaataatcggtaagctcggcccccttgtattcacgttcaagctggttccatgcgagctgctcccatttttcaactgatggatcaaggtgttctgtatgccctttttcagcgatcgaggcaatgagaatgccgcaaaacaagagggcaagcgcaaatggaagggatttcatctttatgttctcctgagtcgttttttgtcaatcttagcgtgtccaaagaagagacggatatgcggttttattttatgtctccctcatattgctatgccgctgtgataaggacaccaacttttcccccgttgcatcggtcttcgacggcataaactaacggagaacttctcattgaaaggagaagcgttagatggatcatgccgattatgacaaagccttgtattacacacaccggtctcaatgggacaatttgttaatattgatggttcgtacaaaagatgatttattatcaaagcgtattgagcactttctgcacgcgtatcatttcgaatatgatcatgcggtgcttgaaaaagagctgtattcccttctcgggtatattgatcatgcgacagagctcgcttatgaagatcaattagccatgctgacataaaacaatcccggcgtcagacgccgggatttcttatgtttgtgaacatattcagctcttcgatcatctctttcaggctgaccgccatatcctcagatacggtccggcgctccatgtcaatgtgaatcgggtctaagaccagctgtttcgggatgacatttgcataaacgccccgcatgaccgtccgcatattcgccagcgcgttcatgcctccttttcctccgcccgccgcggcaatgattgccaccggtttgtatgcccagtgatcgctgcttaaaaaatcgatggcgttttttaaagcgccgctcatgccgctgtgatactcgggagataataagacgacggccgccgactttttcacctgccgccttaactcttgcactgaaggcagctcgttctgttcttcttcaccgttataaagcggcagatcactttcgctcaaatcaatataatcggtatgaaaccgatctctgatataagaagcggcaattctagtccgcccgttttttctcggtgttccgctgatcactaatatgctcatgattttaccgcctttccaaaaacattatattttaccgcatacaatgccgcctgcgtccgatcggaaagattcagctttgacagcaggttggacacgtgggtcttcactgttttttctgaaataaacagtgccgccgcaatttccttattgcttttccctttggctatttcttgaagaacatctttttcacgaggggtcaggtgatcatatttttccttatcctgatcatcctgaaccatatgggtcagcacgtgaggcacaatatccgccgacagccggtaacgtccggaatatacttcccggagcgtttttactaaatcatcgggctgagcgtctttcagctgatacgcttttgcgccggctttaagggcgggaatgacatgctcctgatcagaatagctcgtcaaaacgacgatactgatgtccgggaatcgttccgccgcaatttttgccgcttctatgccgtccatatcaggcattgataaatccatcagaatgatgtccggctccgtcttttcagcttgctgaagcgcttcagcaccggtggacgcctcaccgacaacttcaatgtcttcctgagtggcgaagaaatagcgcagtcctttgcggacaacgtgatgatcatcagcaatcacaattttcatcaatcagacctcctgtcccgaaacggaagccgaacggagacaatcgttccggcgccaagctcggattgcagtgtaaagcggccgccgattgcttcagcccgcgctttcatgccggccacgccgagcgatgggagcacagcatgcgcatcagcgctgaagcccgctccacggtcgctaatatgaagctcagcgcaatccggctttttaacggcggaaatgataacccggtccgttcccgcatgctttttacagttattcaaggcttcctgggcgatccgccaaagcgcgtgttcctgttcatctgtaagctccagctcatcctccatttcacaaacggcttccaggccgataagagcggcatagcttttgatcgacgcatacagccctttcgtcaaacttttcggcttcagctgccaaataagcgctctcatttctgttagcgcatcctgcgacagctcttgaataaacgtaatcatctgccggagccgatcatcatctgtaaagctctttgcggcttttgccgttaagctgacagaaaacagcatttgattgacggaatcatgcagctcttgcgcaagtctgcttcgttccatcaacagggcgttctgctgctcaaattcggccaatttcatccgctgaatcgccgttccgatttgaaatgcaaccgcttcaagaagatgcagttcttcttcgttgaaaaatgtcttttcgcttgcggcgacgtttaataaaccgaacttccggccgccgtcctcaagcggtacggtcgcatggtgggtaatgccctctgtatcgcggcagttcgtcgtctgttccgcgaattcaatccgtttacaattcattatgtttacggcctttgtcaatccgccattgctgaatttggtcagacaatagcattccccgctgcacatgagtgcattttcccgctgaccgagagccggcggtaaataagcggatgcggcgagcgtataagatccgtccggctcaatcagaaaaatccaccctgtctgcagcccggtcaggctgagcagttcgcgaagcactttatcaagcgcttcctttaaatcgtggctttggtttaaggtttccgcaatcgcttttaacgtttttaacgtttctaccgtcgttgtcgttttcgtcaatttccctcactccggccaatcagaattatccatattatatcaattcttttctgtatattcctttgttttcagcatgaatttccctcatactttcggatgaggcgtataaaaaaaccgccggatgtcgcttccggcggtttgttgtttatttcgttttttccactatgccatctaccgttttcatgacggcttcagataatgcggcaagacgctgttcgctgtcttgtaaagaagttcccttcacggcgaaataaaacttcactttcggctccgttcccgatggacgaaggcagaaccaagagccgtcttcaaggaaatatttcaggacatttgacttcggcagatcaatatcttcttcatgatgatcggcaaatacagtccgttttcccgttgaatagtcttcagcctgcgtgatttgttttccggccatctgcttcggcggatcgtttcggaaggaagtcaggatagcggaaatctgctctgctccctgttttccttttaacgtcaatgacttcaagccttcacggtaataaccgtattctttaaaaatggacagcagcgcgtcataaagcgacatgccctgctttttataaaaggcgcatacctcgacggctaacagcgcagcctgtatcgcgtctttgtcacgcgcgaaatcgccgattaagtagccgtagctttcttcatacccgaactggaacgtgtattggcctgatttttcatattctttgattttttcaccgataaatttgaagcctgtcaacgtgtcaaccgtatctaatccgaacgatgaagcgacggcgcggcccaattcgctcgtgacaatcgttttcatgacgacaccgttttcaggaagggcgccctgttttttcttctcggaaagcaggtaatgcaataaaagcgcgcctgtctggtttcccgtcagcactgtgtacttgccttcgctgttttttacggcaatgccgagacggtcggcatccgggtccgtagcgacgagaatatcagcgttttgttcttctccgagtttaatggcatattcgaatgccgcgtgctcttccggattcggcgatttgacggttgaaaaatccgggtccggcagctcttgctcctttacgacggtgacgtttttgtaaccgagtgcttcaagaccgcggcgcaccggtttatttgccgtgccgtgcagcggagtgaacacgacgctgacatccacttcagccgaaagctcgggatgtacggagatggaagtcagttcttcagtatacggtttatcaatttcttcaccgattattttaatcaaacctttttctttcagcgactgttcatcttcaacttgaatcgttaattcattttctatggcattcacttccgcaatgacgatgtccgcttctttcggcggcagctgtgcgccgtcatcgccatacactttatatccgttatattcaggcgggttatggctggccgtcacgacgataccggcataagcgttcagctttctcaccgcaaaagacagctcaggcgtcgggcggagctcatcaaatacgtatgtttgaatgccttgggaagcaagggtttttgcagcttccatcgcaaactcaggagatttatgacgggagtcgtatgcgatcgcaacccctctttttttcgcgtcttccccctgtttcgcgatatacgccgcaagtccggcggatgctttgcggaccgtgtaaatattcatcctgttcgtacccggcccgatttctcctctcatgcctcctgttccgaactcaagatttttgtagaaaaaatcttccagcagctgctcgtttccttctgcgtccgccaataattttttcaattctgaatctaattgttcggtctgattccagcgttcgtaactcttactccaactcatgttcgtcctcctataatttcagcttatgaccatattttaatatgaagcggctgcccgtgtcacttgataacttaaccaaatgctttatgtaaaaagataaaagaagggctcatgccttttcggcacagccctccggttattattgttcgagcggaacaaccgcgtcgtgcagcagcgtatttaaccactcagtgtgtttttctttcgtttcgtcattccattggaatcggtcgctcatgtaatcaatcacggccgttttatacgtttgcacccatttgatgtcgaagaacagtcttcccgttctgcggacgaagaaatcggcaggtgtcgcagccatttcttcttcgatgctgtaagccgcttcagccaaaatgtgaactggaatctggcgtttttccgcttcgtctttcagaccctcaatccggctgaatacattttcaacgttagagccgtatctgatggctaactgcttagcggtttcctgtgataaaccgattttcaagccgtcttttgtctttgcttccacaaatgactcgaagtttttagagccgccgacatgtccgccggaaatcggcatcgtcttcgtcttgcagccgccgaagtcctggccgccctcttctttcaagcggtcgcggacaagatcgacaatgtgctcagccattttacggtagcccgtcagttttcctccggcgatcgtaatcaggcctgattgagatgtccagatttcatctttacgggagatctcagacgggtctttcccttcttcgtgaataagcggtctgaggccggcccagcttgattcaatatcgtccgccgtaatgttcagttccgggaacatataattgatggagctgacgacataatcgcgatcctgcaccgtcatgcgcgggtgctcaagtttttgtttgtaaaccgtatcggtcgtacccacgtatgtttttccttcacgcggaatggcgaacaccatccggccgtccggcgtatcaaagtacaccgcctgtttaagcgggaatacggattggtcgaatacgagatggaccccttttgtgtgctgaagatgttttccgcttttgctgtggtctttttctctcagctcgtcgacccacggacctgtcgcattgacgatttttttggcgtaaactttgtattccttgcctgacagcagatcttcaattaaaacaccgacaacttttcctttttcataaagcagttctttcactttagaatagttgacaggctccgcaccgaatttaacggcttctttcatgacttcaatcgtcagtctcgcatcgtccgtccggtactctacataatagcctccgccttttaagccgtcttttttgacgagcggctctttttgcagcgtttctttagcagacagcatgcttctgcgctctgatttttttactcccgctaaatagtcatacacacgcaggccgatggaagtagaaaatgaaccgaacgtgccgcctttatgaaacggcagcagcatccattccggcgtcgtgacgtgcgggccgttttcgtacacgatggcacgttccttaccgacttctgcaaccattttgacttcaaattgcttcagataacgcaaaccgccgtggacaagctttgtggatctgcttgatgtgccggccgcgaaatcctgcatttcgctcaaagcgactttcattccccttgaagcagcgtcaagcgccgtaccggcacccgtaatacctccccctataataaacagatcgtatgtttttttagtcatgtcttccagcatatgatcccgttccaaacttgaaaattggtgattcatcattacgtttcctccttgttgtcacggtatagaaaaagagaccacaacagccaaagcgcagttatcactttggtgctgtggtctctcctcatctcaggaccgttcctattaacttgttttcagtataccacatttttatcttatttaaaagccatagctgcatttactgcttttttccatccgccgtacaattcatcgcgtttttcatcttccatttccggtttgaattgcttatcaaggttccattgatcagcgatttcagtgctgtccttccagtagccgacagcgattccggccaaatacgcggcaccgagcgccgtcgtttcattaatttccggacgttcgaccggcacatcaagcaagtcgctttggaactgcatgaggaagttattttttaccgctccgccgtctacacgcaatgtttttaaagagatgcctgaatcagcctccatggcatcaagcacatctttcgcctgataagcgagagattcaagcgtagcccggataaaatgctccttcgtcgttccgcgtgtcaggccgaaaactgagccgcgcacgtcactgtcccagtacggtgtgcctaatccgacgaaagcgggcacgacataaacaccgtcagcggaatccacacgctctgcgtatgtctcgctttcttttgaatcttggaacatccgcatgccgtctctcagccattggatagcagaacctgcgacaaagatgcttccttccagtgcatactcgacttttccgtctaatccccaggcgattgtcgtcagaaggccgtgatcagaagtgatggctttttctccggtattcatcagcataaagcagcctgtgccgtatgtgtttttccccatgccttcttcaaagcacgcctgaccgaacagcgcagactgctggtctccggccgctcccgcaatcggaatgtttttaccgaagaaatgataatcaaccgttttcgcgtacacatgagaagacggtttcacttccggcagcattgatttcggcacgcctaaaatatcaagcagctcgtcatcccattttaattcatgtatattaaacatcagcgttcttgaagcgttggaataatccgttacgtgcgccgcccctccggacattttccagatgagccatgaatcaatcgttccgaacagaagatttccgttttccgctttttcccgtgcgccttctacattgtcaagaatccatttgactttcgttcctgagaaataagggtcgatcaaaagtcccgttttttctctgaatgtatcattatatcctttttcacgaagctcttcgcaaatgccggatgtttgtctcgattgccatacaatcgcattgtataccggctttccggtatctttatcccatacgaccgtcgtttccctttggttcgtgatgccgatgccggcaatttgatcagcgctgattccggactcggagatcacagtcgcgataacggcgagcaccgatccccaaatttcgttcgcattgtgctccacccagcccggctgagggaaatgctgtgtgaattccttttgagcggaatgcacgatttttccttctttattaaaaagaatcgctcttgaacttgttgtgccttggtcaattgataaaatataggtctccatgatgccgctctcctttttaaatatattcagaatttgataatgttttctgtgattgagatttcttggtataaatatagagtatgaaaagcactacaaccattataacgcttacaaaccaaaagctaggtgtcacatttcctttaaacgcggcattgtaaaatacgccgccgaacgcaccgcccatgatcggaccgattacgggaatccaggcatatttccaatttgacggcccttttttcggaatcggcagaaaggcgtgagcgattctcggccccaaatcccgcgcagggttgatcgcatatccggtcgtccctccaagagaaatcccgatggcaacgatgaggaatccgacaatcagcgggttcagcccttttgtaaattcattcgctccgattgccaaaatgccgagcacaagcacaaacgtaccaatgacttcacttatcatattcccaaatgtatgaggaatactcgggccggtcgagaaaacgcccagtttagcggccggatcatccgtcgccttccaatgcggcagataatgaaggtacacaacaaccgcaccgatcattgctccgatcatctgtcccgcaatataaacaggtacctctttccaaggaaagctgccttcaagcgcaaggcctatcgttaaagccggattcaagtgggcgccgctgatgctgccgacggcatatgccgccatggctactcccaatccccagccgaatacaataacaatccatccggattggtatgaaagcgatttctttaaattgactcccgcacaaacgccgccgccgaaaataacaagcagcattgtaccgattacttctccccaaaatgctgtcatcatcattcctcctaaatgacataatagcaggtttgacagagttatagagaataaaaaacccacaacaaaccgctttacgctttattgcttccgtaaagagctgttgtgggtctccgggtctccatcacatagtattaacctaggtctattgtaacaatgggtgtaagcggtgtcaatctttttttgtcatagaatgttcatatttagcccatagttcggtgtctgaagtcgtcacggccgtggctcctgcctgcaaggcgttttcaacgtcctgctccgtgcggatgaagccgccggcaaaaatcggaatccccgtcatttctttaatttctctgattaaagtcggaacgatgcccgggagaacctcgataaagtcaggcttatgcttcccgacgaattccatgcttttctccatggcgctcgtatctaagagaaacagacgctggatcgcgtatattttcttttgtttcgctttgacgatgactgatgatctcgtcgaaatgatgcccgcgggccggatatcctggcaaatgaactccgcaccgtattcatcatgcttaatgccgtggattaaatcgacgtgaaccatcagaagttttccgtgttttttcgcttcattcacgacaccttttaattgaccgaggtggatatctaaaatgacgccgtataagaacggactttctaaaaatgcatcgaattgcttcatgttccggattgccggtagaatctgctggttgtgaaaactcatgttttactcctttacattaaaaatcaatgctcagcacactttccttgacggtcgaaatgatgaaagagagctcctcgtccgacaggcaaaaaggcggagacagctgaatgacattattatatcccgctacagtatcgccatttttcccgacaagcaggcctttttctctgcacgcggtgatgacgtgctgcacaagggcggcatcagcgggttccttcgtgattttgtccttgacgagctcaatgccggcaagaaggcccttgccccgtacatctccgaccgccggatgttctctgagcggctcaagctcacggagcagcctttctccaagctcccgggagcgggcgatcagattttcgtcctccatcaattgcaggtttttcaaggccagggcgcaggctgccggattgcctccgaatgtattcacgtgccggaagcggccgtacggctcaccgcccgaatacgcctcaaaaatctcccgttttactgccgttgccgacagcggcagataagcgctcgtaatgccttttgccattgtgacgatgtccggtgaaacgccgtaatgctgaaatccgaacggctctcccgtgcggccgaaaccgcaaataacttcatcactgatcagaagcgcgccgtggcggcggcaaatgtcctctacctttgccatatacccgtccgggggcatcaatatccctccgcctgtaataatcggttccataataacgccggcaatcgtttcgcttaattcccacgtcatgatccggtcgatgtcatgcgcgctttccaatgtgacggcatcgccgggattccgataaagatcaggcggcgccgcgtgcaaaaaaccttgtgagagcggctcatatttatactttctctgcgcctggccggtagcggcgagcgcccccatcgtattgccgtgatagcctctgtaccgggagatgaatttgaagcggctgtgatcgccgttttcaatgtggtattggcgggcaattttgaacgcggtttcatttgcttccgatccgctgttggaaaagaagattacataatcgccgcctagccattcattcagtttttccgcaagctcaatcgcgggttgatggctttgggtcagcggataataaggaagctccttcaattgactgtaagccgcatcggcaagttcctttctcccatatccgatattgacgcaccacaggcctgacatgccgtccaaataccgtctgccgtcaatgtccgtaacccaggcgccttcccctttttggacgattatgctgtcatccggctccgcccctttcatcgcgtgccaaatcagctctttatccttttgtttgagtgactgatttttttgtacatgttccacaccgctcatctccctttcaatatcattgcactgtatcgaaagctgcccggcttctgacgccgattctcttggtgaagttttcctcttaataagaatataaaggcgcggcatgggcgagtcaataaagcggcggcaattaaaaaaacgctttctcccagaaagcgaaagggctacaagagcatatcccgaaaccggggccggtgcaagtgtttttataaaaaaacccgccccttaagcggagcgggcgttttttttatttcagatgcgtaatccggtaaatatctttgcgccggtctttcagctggcgcacggttccgttttcacgctgccttcttaagatttcaaggtccacgtccccgatcacgaccatttcgatattcggattcgtttcaccgacgattccgtctctggcaaattcaaaatcagacggagcaaaaatggctgactgcgcgtattgaatatccatattttctgtttgcggcaggtttccgaccgtacccgagatgacggtgtaaatttggttttcaaccgctcgcgcctgagagcagtaccttacgcgcaagtagccttggcggtcttcagtgcagaacggcgtaaagataattttcgccccttgatccgcggcaattctcgcaagctccggaaattcaatatcgtaacagatctgaatggcgatctttccgcagtccgtatcaaatacgcgcaccctgtctccggcgctgatgccccaccatttccgctcattcggcgtaatgtgaagcttatattgtttttcaatcgtgccgtcacgtctgaataagtaggcgatgttataaattttcccctcttcttcaacgaagtgggagccgccgatgatgttgacattatatttcaccgcgagatctgtaaagaggctgatatagtcctcggtatattcggtaatcctctgaatggccagactcggagaacgctcctcgaggaaagacatgagctgcgtcgtgaaaatttccgggaacaccgcgaaatcagatctcgcatcggaagccacatcgacataatattcaacctgattggcaaattcctcgaaggagtaaatctttttcatttcatattgaatgacgcagatgcgcaccggaaatgccgatttgtaatagcgcttcgattgcggcaggtaatcgacattgttccattccattaatgtcgcatattttatggacgcggtgtcatccgggagataattcggattgatccgcatgagcgtaaatccgttcatcagctggaaagaaagcaccggatcataaatctgatggcgcgtcacctgttcgacataagctctcgccgtcatttcttccgcatacttatgataattcggaatccgcccgccgataataatgcttttcagattcaatcgtctcgccaagtcttttctcgcctcatacagccggtgtccgatcttcatccgtctgtattccgggtgaaccattacctcaatcccgtacagattcaatccgtccgggttgtggttcgtgatataaccgtcgtctgtaatgtcctgccacgtgtggcggtcatcatattcatcgaaattgatgatcaggcttgagcatgaaccgataatttccccttcatactcggcgcaaaactgaccttcgggaaagtgcgcgagatggctgattaaatgctcaggctcccacggctccatccccggaaaacaatccttttgcagctcaataattttgttgatatctttctcttccatattccggatgaccattttcttttcaaaacgggtcagatcaagtttctcagacaatgctgcttccccctgccggttcgttttgatcgttcaatcgctgtaagagtaattcaagttccatttccgccatcgattccagtctgtgatcgtactcttcaaataacagggcgcttgttaccttattcggcacgatgacacatttcatgccggcccgtttggctgcaattgagccgttaaccgaatcctcaaaggccagacattcagatggttcaacgcctaaatgttccgcagctttcagatagagttccggattcggcttcacttcttctacgtcgtcagccgtctgaatcacttcaaattcatcaaacaggcctaattccttcagatggcccgatacccatttgaaatctgagctggacgcgagccccaccttcaatcctaattcttttgccgcggctaaataagcttccaccccggggcgagccgtttccgtcttcatccgctgttcgaagcgcccgcgcctgatcgccgtcagttcatcatgatcgagctttcttcccagctgctcctctaaatatgcgaacggcttaaaccccgcggccgttccgatcacctttccccagacggataaaggcaatgttgaaccgtgttcctcaaacatttcctgcagcacttcatattcatgggtttctgtatctaaaattaacccgtcaaaatcaaagattaatgcttttatcaatggttacagctcctttagttaaacgtactgacctatgtatacactataccgtgaatttctttcgcgttcaaaatgtaacattctgacggaaagaagagcctgcataagtgcaagctctcttcatccgttactgtgtgttttgactggaaatattggaaagagccgctcccgcagactcatttgaacgctgatcaaccgctaagtctccaagcgcaacgatcccgaccagatgattttgatcgacaatgggaaggcggcggatttggtgttgggccatcagatgtgacgcctcttcaagactcatttccgggtttccggatacaactgcagaagacatcacgtgtgaaacaggtgtttggccgtcgcggccttgagccgttgttctcaatgcgatatcacggtctgtcagcattccttttaattcccctccgtcaacgacgggaattgctccgacattatgctggtgcatcagcgcagccgcttcctgaatcgtttgattgggagaaacggtagccacgtgggtagtcattgattgtttgattgaactcattgtaaagcacccctttcgatatttattatgctcggggatttgtctcattataaagggagttagaggaaagaaattgtggtatcatgtcaaggaagcaaaaaagagcctgtcaaaaggctctttatacccgtcagatcagccttctgtgaccgcaggcttctgatccggcccctgtctcgaaagcatcataggtaaagggaaaattcattccgcattcattcagcaaagcgcaatttttatcaaacagcgcccgctttttgacgtcatataccgggtgcggctttgacagcatgatatgtaccgtttgcagacaagccataatttgaaacgcttcttttaaagttccttggtaacgttggttttgtaatgataatacgcccctttttttaaagcgctgaatttccagttcggagaaataaagaggaaagacattttgaaacaattcagaggaaagctcttgtatcgcgctttcttgtccgtcagtcgctgcgttcacaattctcacatcaatcacctttcttgccatgtgaatatccttaatctttatcaagaatagcacagaaaaaaacgcgaaagctaaggtaagtgtttcctattgaaacagccgctttccgcttgaaaaggagctttatgatatgaaacaaaatgaccgcggtctggaactcctgattacggaaaagcacgccggacaatggctgttttcagtcctgaaatctgaattccaggcgtcaaaacccgtaattacggaatggatgaaccaagaaagcattcaggtgaatcgaacatccccgaaaaacaacatcatactgaaaaccggagatcgcttattcattgatcttcaggaaaaaacgggttcttcggtgactccggaatacggagagccggacattttatttgaggacaatcatatgctgattgcaaataagccggcgggaatgccgactcatccaaatgaagagggtcagaccggcaccctcagcaacctgatcgcttaccattttcaaatcaacggcgagcaggcgaaagtgcgccacgttcaccgtcttgaccgtgacacgtcaggcgcggtcgttttcgcgaaacaccgcctggcccatgcaatccttgaccgtcagctcgaaaccaaaacattaaaacgcacctatatcgccgcggcggaaggaaaagtcgcgcctaaaaaaggcacggttgactcgccgatcggccgcgacaggtcacattcggtcagacggcgtgtctcacccggcggacaagctgccgtcacccattacaaagtgaaaggctatcatcccggtgcgcagcttacattggcagagcttgaactggaaaccgggagaacacatcaaatcagggtgcatatggcaagcatcggccatccgttggcgggcgatgacctgtacggcggaagcaggacgctgtttcacaggcacgcgcttcacgcaaaaaaagtcagtgtcgtccatccgatctcaggagaagaaatcgttgccgaggcgccgatgccggctgatctggctcattttaccgaaacgtattttttttaaaccgggtcggcatatataatatatcgtttcggcgcatttccaatgtaagaaaacgggtagcaagtggtcaggatcagttcctcccgcttgtgctgaagggtgatgacagatgtatcatcccggctgacgatttttgtacggctgattttataagaaaacgtgccgtaagacaaaatcacgttcagtctgtctccttttttcaattcgccggtccggcggaacaccgtgtccctgtggccggataacacaatttggccgtgatcgcccggataatagctgtccttataatgtccgacgccttttgctaaatcatctgcgtcagtcccttcgacgatcgggagctcagcgtcgatttcagggatttctaaaatgccgcttgcctcacccgtttcggggtgaaattcttttttgcgctgtgtcagcacagcgctttttgtttcgttcttttccaagacaggttctgttgctttttttgcttcttcaagcgattggttcgttttcatatgtgaatcaatgatcttccagcttccgtaacatgtgatgatgataccggcgatgatgacgagaagcggaatatgtttcagtttgttcatcgtgtgcgggttccccttttctttctgaaaagccaatatacgccggcacccgtgatcactaggccggccaatgccgtctgatggctgcccgctgaagtatcaggcaatgggcggcctttttgtgtgccgctttcagtctgttttgtgctttgttccgaatttgcggcagacgccggacgggattcgggaattgactgcactgtatcagatgctgtttcttctacgacaggacgtttagtttttttggtttgatcaggctgttctgccgcatccggttttttagcgggtttttccgcttgaggtttttctcctttatcaggcctggtgccgcccggtgtttccccgcttcccggctgattgccggtgtcatcaggtgtttcggcggctgataccgtgcggatgcggccgtcggtttgataagaaatcggcgcggaaaagcttttgacatagtctactgtcgcttccaaatcctcaggccccgtcaccggattcttgccgagtttcccgatcggaccgtattttgcccccgctgccgtcgccataaattgattgactgttactgtatatcctttttcgggctgtatgtctgtcccgtccgccattttcatttcaaccgcttgtccggtttccgggttccatgtataggaaaatccgctgatgctgtaatccggaccgtacaccggagaaatttgcgcgttaatgatctcccgcaaatcttttcctttgatttcaagcttcgtcagcacattgccgaacggctgtacattataaaggtctccccatgtgatcgcccctttttttatgccgtcccggatgcctcccccattcataagcgcaaaatcggatttcatcttcgctttcataccgtcggcaatcagatttccgagcgccgtgtcgccgtcatttgaatacccgcccgttatatcatgggccgcttccccgaccgcttcgctgataatcggtttcactttctcttcatatttgcttaatatgcctgccgcagccgggtcaggcttgattttactttgatcgatatattggatttccgctgattttttcacgatatccttcgactctttatcaagttcaagatcggcgattccgattgcttttccgtattcaaatgcctgcacgatcagcttgccgtcgatttctccgtttacgactttatgattgtgcgcggcgaaaatcacatcaatctctgagtctgttccgcttgcaagctttgcggattctcccgtgattgctgagccattttgttcagcagacatatgggcgagcacggcgattgctttaattccttttttcttcaggtcagcggcggcgtcattgacggcctttacctcatccgtaaacgtaatatctttaattccgtccgggatgaccatgcctgccgccgatctggttacaaccccgataaatgcgaccggaattccggaaacgtatttaatttcatacggcggcagaaaggactcccctgacttcagtttacagttggcgcagacgagcgggaaattttggccgtcataacagcttgtccccttaccgtccggatgatctcctccattgatgatccgtttaagctcattcgttccttcatcgaattcgtgattgccgacagttccgacatcaaaaccgatgtcttccatcaattctactgtcggttcatcctgaaaaagggctgacacgggagagctgcccccgatcatatcgcccgcatgcacgacaaaggcgtgttctttctcggctttcgcctttttaatgtacgctgcggcgtagtccatccgcccgaacgtgccatccggtttaccgtctccgttaaggtcaagctcatattgctgatcaatttttccgtgcagatcattcatgctgatgattctgagcgggacacggccggagtcttcagtctgccgttctttatacgctttatccattccagcttcattcagtgatcctgcttgtccgattgcttctgcatctttcacgctgaacatcataaaacaaaccgtcagcaaacagcacgtaagacgcatacccctttttttcttcatttatttcccccctgtcttctaagaaatacgttagcttattttcttagaaatcacatcacttttttgtaaagattgtcttcactggcgcaaaatagtaaataatccccacgtaacgaaacaggtcttgatgtataacggatcggcttttttcacatcttaatgatgatttgacatgaaggaggaaaacaaccagtggaacagcagcagaatcagcagccgccagtaaatcaagggatcccgggttcaccgcaagtgaatcacggaggacatgagcttttcgatatgcatgaagtgctggccggaacagtcggcgttttggatcaatttatgatgctcagacagtttatacaggatcagcagctggccgacatccttgaccgccagtatcaattcattctcggactctataatctgacggcagaatgctttaagaccggccaaaagccttctcaggaaacgtcgacatatatgatgaaggaacagaaccaggccgtctacggtataaaaccgactcagccgaaaaaaccgaatcaatcattaaatgatgtcaaagatctcgggatcagcggccatatgctcggcctgattaaagctcaagcttctctcttgacgatgagctcgcttgaaatgaccaatcccgtcactagaagagtgctctccgcccaaattcagcaatatgtcgaaatggcgtatgaaatcttcttataccaaaacaaacacggttattatcaggttcctcagctcaatgcacaagatatgcagaccatgctgaattcatttacgccggcccagggacagccgcaaatgcctccgattaaaggacaaatgggacagcagcagcaaaacctccattgattaaaaaacggcgttggaaacctgactctccaatgccgttttctttttttcatatgcttttatgaaatcatgttcaaattgtttcaggctttctttcgtagccgcttcaaagcctttttcaaaatcctgtgtttcggcggttttgttgataatggttaagataatgccttctccgaatgtttcggttaagtcctttatcatatagaagctttgcaaatagacatccgtttcatattccatacgcgatttctgccattttcggtcggtcgttaattgatcaaacggcacgacggaaaatgcaatcggatcaatgactacatcataatgcgcgacccactcgctcagcccctcatgaaaccaaagcggaaatacagacgtatccgtccccaattgccgcgttttttgatgaaacgcgtaatgtgtatattcatgtataatcaattgcttatacatgaaaacggccagctcatcttttttcaaaagctgttttttctcttcaggcaaaagccccatcatctgctcctgttctgaataaaaaccgactacatttttcaatcctgaatattgctccatttcagcttcatccgaaaagaaaatgagttcaagcggcgctgcacctttatagccgacaatgatttgattgatacgctttgcgtggtccagcgtaagcttggtcagatccaagagcggcttttcatccgccgtatagtaaatcgctgtatgtttgtaaatttctttattcatgtgttcagtcacttgttccttcgtcggaacagagcggctgttttggcctgacaggacgtacatcatacttactgaaacggctgaactgacagccaatatgacaaggactccgcacaggatcagagtgaatgccgcccgtttccccatgccgtcacgcaaacaagctcccctccccgatcctttcattttcatctcattctttactttatgctcaggagcgctgggtcgtgacggcagataaaataaaaaagccgcagcaaatgcggcttttccattcatttatttattggggtttgggaatacacgctgaaccatttggccgaactcatcaaacagaccggatacaggatgtccgttttggattcgttttccgtagccttgcatacgttcaacgaagtccgggttcgctgatacatatacagtccggacatgtttatcggctgatttcaccttatcggtaatcttattttttaaatggttggcgatggcgcctttttgcccgtttgtcaaaacaacagcaacatatgcgctgtttccggcaacgatcacagtcgcatttttaacctcttttaaatcagtcaccttgtcggcggctttatcagccactctcaggttacgattgtcattgtgatcggtgttttggttatgacggttcactgtattcatatttgtcgcaccgtcgttaggcgtgttgcggtaatttacattctgggtgcggttgtcatttcgttttccttctccctggttccccatactgcaccctgcggtaatcagcatcggcagaagaagggcagagataactgcttgcttttttatcatgtgaattcctcctttctcactttacgtataggtttttctattcggcgggatttatacacgccgtttgcattctgagcggtttggataaatatcagaaggaaagggaaaggtaagcgtaatcaattgaatgaggagggatttaacttgttcagaaaaaaaagcggcatcggcccgacagcgctgctgatcggatcatcgattctgattgcagctttatcacccgaaatccgccggaaaatctccggaatggtttcaggcagaatgcagcataaagatggcacacactccatgcagcctgctgacctgattcaacaggcgttcggcggggaatccggcggacagcagcacgcagacaaagcccggcattcacaaaccggctcattacagcctgccgagctgatcaaacaggcgttcggcggggaatccggcggacagcagcacacggacaaagcccggcattcacaaaccggctcattgcagcctgccgagctgatcaaacaggcgttcggcggggaatccggcggacagcagcatgagcagacttcccgcaatcactccggctcatcccatacggacagacaggcagaccgcagccgcagtaaagaaacttcgccgaagcctcactataccgagccgattcacttcgaagaaagcgcggtaaatgttttaaatgacagcaccgtgatgaatatgctggaagaaattgaacccggaaatcattagaaacgaaaaaatccttcattcgttcaacgatgaaggattttttcgttttagcgctctatctcatatttttctataagaaaatgaaccatcgatctgcttttgttaagcttcttcagcttcaatgacgattgaggaatcattgtacaccgcggtatcggtttccttcgtcattttacttgttaacagccctgcggtcatactgccgctgacatttaaggcggtgcgccccatgtcaattaacggctcaattgaaatgagcagcccggcaagcgcgacaggcatgttcaaagaggataggacgagcagagccgcaaatgtcgcgccgcctcccacgcctgctacaccgaatgaactgattgccacgatggcgatgacggagatgataaatcccggttcaaacgggttttgccctactgtcggcgcaatcatcatcgcgagcatcgccgggtaaatgccggcacagccgttttgaccgattgataagccgaatgaaccggcgaagttcgcaatgccttccggtacgcccatgcttttttgtgttttaatattgagcggcaaagcccctgcgcttgaacgggacgtaaacgcaaacaccataaccggaaatgcttttttcacgtatgtgatcggatttaaaccgctgaacgtgatcagcagcaagtgaatgataaacatggcgataagcgcggcgtatgaagcgatcacaaacatccccagtttcgcaatgctgtcgatgtcgcttgtcgcgatcgttttggtcataatcgccaataccccgtaaggcgtcagtcttaaaattaatgtcacgacgcgcataataatcgcgtaaaccgcatcgacaattccgctgaatgtcgctgcgtgctccggctgcttccgtttcacccccagaaaagcgatgccgaggaaagcggcgaaaataacgactccgatggtggaagtcggtctggctcccgtgaaatcaagaaacggattccccggcagaagctcaacgatttgctgaggcagcgttttggccgtcatatcctcagatttttgctgcagctcctgaccccttgataactcagtgctcccctggtcgatatgaacggctttcagatcaaaggaaagcgccgaaacaattccgactgccgcggcaattgctgtcgtagcgatcaaaattccgatgatcagaccgctgattttcccgatgttatgggtcagtttaagcttcgtaaatgcgccgagaatagaaataaagactagcggcatgacgatcatctgaagcaatttgacataaccgccgccggcaatattaaaccaatcggccgtttgtgccacgacatgtgaggccggcccgtaaatcaattgcagcgcaaaaccgaatacaatgcctaatccgagcgcggtaaagacacgtttagaaaaggaaacgtgttttttttgcatcacaaacagacctgctataaacaaaaacaaaataaaaacatgtaagattacaaataaattctccaaaacaggtaaacactcccttgctcattatccttaaacactatattacatcaattccgatcggtcaagtaagaattgacaatatatgtatttttaatgatttttctcttttctttccatcctttctttagtaacttatataagggtgattgttatgctgaaggaactgtttcttaatttgacgattttaatcacatttaattatctcttcaccgttctttttaaagagtcgctttcacataaagaagaccgtccgatgtttcaattactgaagggggcggtttgcgggcttttaggggtttttctgattgctttcggcttttcttactccgattccatcattgatctcagaaatatccccattatcatcgccgctctttacggaggctgggtgtctacagcagctgcctttatcattatcgtggcaggccgtatcctgatcaatttcaatgccagcgccatttattctatcgccgcagtcggcatgattgcgatactttctgtggccgtattcagaggaaaaaagccgaatcacaaaaatgcgttcgttatgctgctcttttcaaatgttattatcaccctgacgctgctgttacttatgcctgaacagcctgccggggccctcgtttatttttggctcatttctaccttgggcggaatgctgtcgctgtatatcattaaacacgaagccgatgcccgccttttgttcaagcaatacaagtttcaagcgaattatgattttctgacggggatttttaataagagaaaattcgaggaagtctcgcgcgttctgtacgatcgggcgtctcaatccccctcgtctcagctcgcgcttatttatttggatattgatcactttaagcagatcaatgatcaatacggccattatgaaggggaccaagtactgaaggaactgggggcgcgcctgaggttcttactcagcagttctgatccgtcagcccgcatcggcggggaagaatttgccgtgcttatgcccaattgcacgtatacaaaagggcttcacctcgcagaagaaatcaggcacacgattgacgcgaacccgattctgctgacgagcggagatacaattcccgtgaccgtttccctcggcatcgcgcattatccgacaaatacatcggatcctcagacattgcccctgatcgcggaccggatgctgtacaaagcgaaaacatcagggcgcaatcaagtgtgcagcactgaaaaaaaagaatgatcgcccgaagaggaaatcattctttcttttcagtgagaaagccgcctttcaggaaaacaggaatcaggctgccctcatattctttttcaataaacgccgcggtatcatctgattgatacaaagacaggagtttttgcatccgttcatcatctttatcctcagccctgacggcgatcagatgaatatacgcttccttcatttgcgccgatcggatcagcgcgtccttctccgcatgaaatcctgctcttttcgcctcgctttgactgagaactgctgcgtcagcatgttccgccgcctgataggcgttcttttttgtttccgtttttaaggtcagatgcttcgggttgtccttgatcatatcagttgaacccgtaccggtgaatccctttttcaatgtcatcagtccggcctcctgcatgagaaaaagcgccctgccgaaggccgccgcttcaccaggcacagcaatgaccgctccgtccggtatatccttcagccgtttatgttgcttggaatacacccccagcgatgccgcatatgtcgttcctaaaggagccagcttctttttcacatgaggcggcaaagattgaaaataagaaacggattgaaacgcattggcgtcgagatccccgccggcaagcgccaaatcggcctcggcataatccgaaaacgttaccaaagaaagctgcaatccttcctcaccggcttttttcgcgacaaactcccagatcgattgatcagattcattgattccgatagtaattgtccggttcccgtcaggataatggcatgaagtaagtgatatgatcaaaatgaaaagaaacagactgtttataagccgcaggttcaagttgacctactccctatctatttttatgtacagaggctgcaccatggtattcgggctcatgattacatacaataccgattaaaaaaagggttgtcaattgcttccttaagaggctgcaaagcggtttttatcagctgaaaatgggctgttctagtctcaaatcagatttccgtatcagagcgttctcctcttaaaacatgttatttcgaaaaaagttacatttagcagttgttttttcttcgaattactggtagagtaaaggtaattatttttgttcgaactatctttaagaagaaagttttgtaagagttttcgtcttggaagtttgttttagagcaagaatagtgaatttaagcgttatgtcgctttaggaggaaatttcatgttagaaggtaaagtaaaatggttcaactctgaaaaaggattcggattcatcgaagtagaaggtcaagacgatgtattcgttcacttctctgctattcaaggcgaaggcttcaaaactttagaagaaggccaatctgtttctttcgaaatcgttgaaggaaaccgcggaccacaagctgctaacgtaacaaaagcataaattgtttaaaaaccctgccggtgtacgccggcagggtttttttcatctaaaacgaaaagctgttttgcaaaggcaaaacagctttttatatcaggtggcaatatcgcgttttaagaagacgccgaatgcgagcgccagaaaaataacgaagtaaatcacaagcatcacaaccgaaaatgtcatcgtcatcccctctactaaaggagtcccgttcatatattgcgacaaatccgtattggcgaataaaatatatttggtccattcaaatttcgtggcaagaaatacagtcgccgtgtttcccataaccaatagaaaaatagaaaatccgaccgctaatgagctgttccggaataccgcagacagcataaacgccatcgtcgcaagcataaaagcggagacagattcatagacatatgttttagcgaggaaggcgatgatattttgctcaaaaacatggccgtctttgtatacgagatgaacatcagccgcagtatctccccctgtaccgaaaaagaccaatcccaacagagcggagccggcaaataaaatcacaagcatcagcagtccgaacagcagcaccgtcatatatttagaaagcaaaatctgaaaacggctgagcggacggatagccagcagcttgatcgtcccccagttgaactcattcgccacgatgcctgcggcaatgataatcgtaaacagcccggtcaaaacagtcatcatcgaagaatcagctacgtatgaccacactgtgtaccctgtatcctcagggatgttatgatccatacggtattgatttatcgcgacattctgtttcaggttatcaatgagcgtctggtttccggtttccttcatctgctgtttcatttctttgttttcggcctggagctcctgtttccaattcggattggcttcgctcgaggtgaaatggtttgacagaagcgcaaaaccgatcatcgaaacgcctaaaattacaatcatagcccacgtgccgacgcggctgaaaatttttatccattcattatagatcagcttaaacatattgaacctcctctttcgtcccgccggtaatctccaagaaacggtcttccaaagattttgtcatgattttcacttcatataagcggatgttttcacggacgagcagtgaaatcacatcaggcacttcctgttttgacagcttgatctcaatgccgtttgtcttcttcacacagtcaaactgactcagaacggcaagagcctcttctctttgttcaatatggaagaagtatgtatctttatcctcttttccttcatcccttactttttgaatatcgacaagctcccctttttgcagaatgccgattcggtcgcacattaactccatttctgacagcagatggcttgagacgatgacagccattcctttttcacgtgtcagctttttcagatggtccctgatttccctgatgcccgcgggatcaaggccgtttgtcggttcatccagaatcagcaccttaggattatgcagcaggctttgggcgaggccgagacgctgtctcattccgagagagtaggtttttactttgtcatgtattctgtcctgcaacccgacgagctcgatgacctcatctattttttctttcgtaacgccttttaccatccttgcgtactgctgtaaatttttataaccgctcaggaatttgtacagctccgggttttccacgatggctccgacgtgcctgaccgcttttgcatagtttttcgtaatggattccccgcagattacgatgtctccctgagacagtttcattaatccgaccatcattctgatcgtagtggttttccccgctccgttcggccctagaaacccaaacacttcgcccgcccggacggagaagctcagatcatgaataatcgttcgtccttttatcgttttctttacctgttgcagttctaataccgtttccaattagaatcccccttctatttcgtgcgcctgcatgacgcttctgtaccattgcagcacggacattccttcctgttccctaatttcttcgacctcgcgccgttcagcgattttcccttttatgaaaaccatcacttcgtctaacagcgtctcaatttcgccgatctcatgcgtggcgatgacgacgatctggctgtcaaaatcaatataagatacgagactgttgacaatcgattctctgaccgccggatcaagacctgaaaacggctcatccagcagaatgacggatgcttttctcgacagggccaaaacgattttcagcctgccccggctgcctttggacagctcttttatcttctgcttcgctgaaagattcatttccgttaataggttatgtgctttttccagctgaaaatccgggaattgcgaatgataaaatgtgagcatatcaccgacggtcgtccgggcgaaaaacatatcatgttcggttaaataagccgtacgaaacagcatgttcctgcttactgcgcagtctccgatccggacggcgcccgaggtcgggaacgcaagcccggcaagcattttaagcgttgttgatttaccgcttccgttcggccctaaaattccgtagattttacccggagacaatgaaaatgatacatcgctgaccgcgagcctgcggccgtatttttttgttacgcgttcaaaatcaagattcatcgtttgcttcctccgcatattgtttgatcccgtcgatcatttcctcaggagatagccccagctccgccatttcctgaataaagcgtttgaaaacgtctttagtcagcctgtctttcagctccgctttcagatcggacctttccgctacaaaggttccctgtcctcttctcgtctccacgatccccagcctttccatttcactgtacgttctttgtatcgtattcggattcactttcatctgtacggccatctcccttacggacggcagtttgtcccccggtgaaagctcacttcggatcagccggtaatatacacgatcggcaatctgcagataaatcggcttggatgactgaaattcattctccatcattacacctcaacctttcgattcagcagcatagaggccagtgcgagacagagcgccgcaagcacgatcactgccaggaagctgaaaagcgagatgtggacggccttcagctccaccgtccagccggtcaattttgtatagtgaaaatcaaaatccgcatacacttttaccggccataaatcatgttgagatgaagtgaaaggcgtaatgattttatcgtcaatataggtccagacaaacgcaagcacgatgcagatcacccaacggaggacgggaacatgttttaatgagtgaaaaacagtccaaaagacggccacgatcacagataaatacgctgaactgatcagcaggtaagcattcagtccggttaatgtgccggccaggggaatggtgtgttccagcgctccttttgcagaaagcatccggtacatccaaataccgtaaccggtcagcgccagctgcccgatcaactgatacagcagtgaggccgtcagcttggaagccagcagataaaatcctccattcggattgtaaagccacagctgattttttccttctttatgaaggtgatagtacataaaaagcggcgctacaagaaattgaaaaaaccccattgccgtaaaaaagccgaaaatgacgagcggttctttctgacgggcagcgatgacatgggctgcaaacgcccagcaaatcatgccgcaaagccacaccgcgagccaaatccatgaaactttcgcatcttttttcagcaaacctaaaaacgatgtcattctttctctctccattcggatcaagtgtatgagtaacatagtacactagatcatcacgtattacaatatcttcaataaaaaaaagacaaatccgctcttacgcagatttgccttttcaattacttctttttgttttttaaggagagcagcgcatcacgatagctgctatcctgcattttgccgccgctatcaggatcgtttggttcctgatccgtctcagaagtcttaaacttctgaagcgcctgacggtacacatcatcgcccattgtattctttttctcacggggagattcagattttacaacgactggagcatgctcggctgagcgctcctcggccggatcatgcttttccggctgttcggctgtagtgccgatcgcttctctcttttcttctttgacattctgtcctgcagaagtgctgcggacattgaatgtgataagaagtgcaatcacaatgacagcagcaataaccgctataataatggccatataaccctctccttactgtcgtccggcagttagattacctgtgacttggctgacacgtctgccaagcgcacggcctaattgaaggccttcttccgtcatcagcacatcgctgtcaaccgggcatgtgacgcccgcgccgtagtaagagccgtacagcgcgttttcaggaacgttgccgggaagtccgacaacaatcatgccttggtgaaacataggagtgatcagattgtgcattgtcatttctaatccgccatgtgttgtcgccgtcgtacagaatacggcgccgactttatcaatcagctcgccttcagcccacagatagccgagtctgtcgatccacgcttttaagcctgaactgatggtgccaaagtgtcccgggcatccccagataatggcatccatgtctttcagcttgcggatgtctgcttgatcgacatggtcgatcaggacttcagcctcagcgttttctcgtgctccttcggcaatggcttcagcaagatgttttgtatgttcgccttcactatcgtacactacgtaaattttcattcaggaaacctcccattcagatgattaagattccttcacttctttaggggccggaagcaatgacagctcctcttttttcttcgcccgctgtttgtctttccgtacgtcacgcaagaacaggctcaggactacgccgataaccgcaaagatcgtcgcccacataaacgcgtcattaatccccataacgttggaattaagtgaagctgttttgtagagataagaataaacggtttgtttcgccgcatcaagcgacatgttcatgttgaccattaaattcgaaaccgcgctttggaacgactgcatgaagcttggatcagccgtgctcgttttatccgcaatctgcgaatagtgcattgtcgtacggttcgtataaatcgttgtgatcaaacttgttccgattgaaccgctgatctggcggagcgtgttgctcatcgccgtgccgtggctgttcaaccgtgccggaagctggttcattccggctgtcataacaggcatcattaacagtgacataccgaatgcgcggatggcatagacaagcataatgtgcgtgtaaggtgtgtcaattgtcaattttgtgtactggaatgtcgttgcgaccgtgatgaccagcccgataatcgcaagcggtcttggaccgattttgtcaaacagaataccggaaatcggcgacatgatcagcatgacaatcgcgcccggcaatagcaagaggcccgattgcagcgccgtaaagccgactaagttctgcaggtaaatcggaagcaggaacattcctgtgtaaagcgcaacggtaataatgatgttaatcacactggaaagtgagaaaatatcatatttaaatacccggaagtcgagcatcggtttttcagagcgcaattgctgaatgacaaacgcggcaatcgcgatgacaccgacaatgacggtagacagcacgatcggatctccccagccgtcgctgcccgcttcactgactccgtaaagcaatgaggcaaatccgacaatggatagaatcgcacccaagctgtcgagtttgattttttgcggttccaccaagttcttaaagaggaagaacgctatgataataacgattgccccgatcggaacaaggccgtagaacataatgcgccatgtgtaatgctcgatgatccagccggaaagagtcggtccgaccgccggagcaaacatcatcgcaagaccgaaaatccccattcctttccccctgctttcaggcgggaagataagcagaatggttgtcatgaccagcggctgcaggataccgccgccgaccgcctgaattaaccggccgatcagcatggttgagaagttaggcgcgattccgcagactaacgttcccgctgtaaaacagaacatggctacgagaaagaggcttctctgtccgaaccgggtaattaagaacgcagataacggaatcaaaacaccgttgaccagcatgtatccggtcgtaagccactgaatcgtcgtcgcactcacaccgaactcggtcattaagtgcggcatcgccacgttaagaagcgtttggttcaagatcgccaggaataacccggccataagcacaataagcaatgttttaggactttttacttgattatctgatttagccacctaagacaacctcccttcatggtttgatgactgatctgtattattcagagatttttacagatgcgttcataccaggaagcaccttgtcagatgggttgctgagtgaaattttaacaggaactttttgcgttacttttgtgtagttgccgcttgagtttgaagaaggcagcatatcaaatgttgaatttgtcgcataaccgatttcttctactgttccgtcaaatgttgtattagggtcgccgtcaacaattacgtctactttgtttcctacttcaatgtctctaatatctgtttctttaatgtttgcagtgatgtaaaggtgtttcatgtcaatttcctgggcaattgtcgtaccggcttgcaccatttggccgtttttcacttcgtttttcacgattgttccatccatgatggcttttacgtcagcattttgctgtcctttgatttttgcaacaacgtcgtttttgcttacttctttcccctcatcaaggttccagtcagttactttacccgcagcaggagctgtgatagcagccatgtcgccggcaacttttgcttcatcggtttttacatagtgtgtgctttgataatagtagtaagcacctccgcctataattgcaagaacaacaatcaaaccgataatgttggtcagaattaaacgtcctctgttcattttgttttctcctttcgtttcttcctctatcattttgtggaatgatgataaaaatatgtggggatttttttattttccgtttttcactgcacagccgtttgcaagcttcgttaaactttccgcaagcttgcgcaggtactgcagttcagcggtattgagctgccggtataagaccgccgctttttcggcatattgaacagcagctttctttagaagttcttccccctcttcggttaactgaatcataacaacacgccggtcgtcgtgatagtcgctccgaaccattaggcggcgcttatacagaatatcggtcattctcgtgacagacgccggtttcagatcaagcgacaaagccagccttgaaagctgcgtgcttttgctcttatgtattttgaacatcagcagatactgcagcactgtaatatcaaaaggttcaagaactgtctccagaatcattttctgctttttgtaaatcgatctggaagtatcaaacagttgttcaaaactgagcaaagcgagctctgattcaatcaccgtattttcacctcattcccttaataatagttcacaagataaaatattaataaatgaaagaaggtttgtaaagagaaaagtttcattttttaaggattttttttatgccgttttttctctttatttttaatttaaaaaagccgggtgaagaaccgcggccgcacgattcttcactcggctttatatttcatacgatgctttgcttacaccggcttcctcatttttaaaaaagcttttcagcgcttgaaatacgtctgatttctgtttcaggatgtagtatttaaatttatcatctttgacatttttataggcggacatgagggtggaatgcctgttatattgattgacctcaccgtaacagaacagattcgattttttcatgatgtcattgacgagctttacgcaccgggcattatccgaagtcaggttatctccgtctgaaaaatgaaacggatagatgttgtagcgggcggggtcatatttttcatcaattaattcaagagacttccggtaaacggaggaacagatggtgcccccgctctcgcctttcgagaaaaaatcttcttcggacacaaccttcgcttccgtatggtgggcgataaattcgatatcaaccgtttcatactttgtccgtaaaaatcgtgtcatccaaaaaaagaagctcctcgccatatacttttcccatacgcccatcgaaccgcttgtatccatcatcgctaaaacgacagctttcgattccggcttcgtcacatcattccatgttttgtatttcagatcttccggataaatagggtaaaacgacggcttgcctgtcatggcgtttcgtttataggccgacagcatcgtccttttcttatcgatattccctgtcagcccggttttccggatatcattgaactcgatatcggtatggacgatattgtccctttccttttgctgcagattcggcagttctaattcctgaaacagcgcttcttccagatccatcaatgaaacttccgcttcataataatcctcgcctgcctgatcgccggctccctggccttttccagctccctgctttttatctgcgccgtctcttgcgacgacatcgccgacttcgctgtcgccgtcgccttggccgacatgtttatttttatcatagttataacggattttatattcatcaagcgaacgaatcgggattttcacgacatcttttccgttggacataataatgctttcctcagtgacaagatccggaaggttgttttttatcgcttcctgtactttcttttggtggcgctgctggtcgtcaaagcctttgcgatggagggaccagtcttcctctgaaatcaaaaaatttccgctgtcattacgggacatgaattcccctccttaaccgttatggtcgttttacatgtgtattccggcttggtcctgtttatgaaacaagtccggcgaaaagatttatttttatcttatgccggccggactctccaattgacaaacaattgcgaaaaacagacaaaagaacccgtccttttacagacgggcctctcaatgaaatcaaacatcagcggtttaacaagcttccgacatacttcagcagttcattagcgcttgtcgaattatagccgtgttcatctattaaccttgccactacctcattgacctttttaagctgctgctcatccggcgttttggtggaggtcgtaattttcaccacatcttttaagtctgcgaacagctttttctgaatcgcctcgcggagtctttcgtgcgaattatagtcaaagcgttttccttttcttgcataggcggatatgcggattaagatttcttcgcggaacgcttttttcgcgttttctgaaatgccgatctgctcttcaatggatctcatcagtttttcgtcaggattcatttcttcacccgtcagcggatcgcggagcttatttttattgcagtacgcttccacattatctaaataattgtccatgagagttttcgcggattcttcatatgaatagacgaacgccttctgcacttcttttttagcgatgtcatcgtactctttcctggcggcggaaataaaattcatataccgctctttgtcctcggcggagatggacggatgctggtcaagtccttcttttaaggaacgcagcacgtcaagcgaattgatcgattccatattttttctgataattgttgaggaaatgcggttgatgacatagcgcgggtcaattccgctcattccttcatcatggaattccttcttcatatcctcaagatcaacggaattgtaaccttcaacgctttctccgtcataaagcctcatttttttgacgagatcaatatcagagcggttcggttccttcagccgggtcaaaatagaaaacatcgcggccacttttaatgtatggggggcgatgtgtacgtcagaaacatcactttcagaaatcattttttcataaatccgttcttcctctgacacctttaaattataaggaacaggcatcacgatgatcctggagtgaagggcttcatttttcttattggcaataaacgagcggtactccgtttcgttcgtatgcgcaacaaccaattcgtcggctgagatgagcgcaaaccgtccggctttgaaattcccttcctgcgtgagtgacagaaggtgccacagaaatttttcatcgcatttcagcatttcctgaaactccatcattccgcggttcgctttatttaattcaccgtcaaaccgataagcgcgcggatctgattctgagccgtattcggcaattgttgaaaaatcaatactccccgtcaagtcggcgatatcctgtgatttcgggtcagacgggctgaaggttccgattccggtacgtttatcctccgagaagaatatacgttcaacctttacatcctcaattctgccgccgtattcttcttcaagccgcatgacattaagcggagaaaggctgccctcaattctgatgccgtattctctgtagaagtcgtcgcgcagatgatggggaatgagatggagaggatcttcatgcatcgggcagcctttaatggcgtaaacagcgccgttgtctgtcaatgagtaggcttcaagcccttttttcagcatggtgacaagagttgactttccgccgctgacgggtcccatcaatagtaaaatccgttttcttacatcgagccgcttggcagccgggtgaaagtattcctccacgagccgttccagagattcctcaaggccgaacagctcccgcgagaaaaagctgtatgtctttttaccgtcatcctcctcgattccgctgtcttttatcatattaaaaacgcgagaatgagcagactgcgcgaccaatggattttcttttatgatctccaaataatcagcgaacgtcccttcccatttgagacgctgctcttcctctctgtacttttcaattttctttaatatatccataagaacctcctctatcatggttaatgcactagaaataaggtactttgttacaatctatgcggtgacgtgataatacatgcttttcgtttcttaaaaataaagacgttataaggccgtcattgacaagggtccggtgcaccgttcataatgaaagaaatacagtttcatccagactcggacatcaaatggaaaagcaaagaggaggagaaatgatgaaaacgatcattttacttggggtcattctcacttttttagtatccatttttacggcgggttacgacagcaaacctgaaaacaaataacggcaaaagggtgctcttcataaagagcaccctttcctgtacaacataacaatgtttcatatttgaatatgttcttggacagttgatttttcatgagatttgcagcttgtttgatactcgatttttccgattttgcagcccgggccgatttccacatgtttccctctgacgatgtccgcttccgtgtattcgaggtaaattgcgtccccttcgatcaattcagcagaaagcgtgccggctttccgtttaagaaaaccgggtttccgtctgacggtgatcgatgtgccgccgatttctttcacgcggcttcggtcataacgcaaatggatgtttacgtcccccgcgtttaacaatcccgccacattgatacatcctgttacatgaagcagctccgtctggcaatcaccgctgacggtgagactgccttttatatgacaccgctctcccgcggccccgccgccaatttcagcaagtcctttcagcctcatcgtggcgaaacgcatggagccgccgactttcaatgtgcccatcacatttgctgaacgtgctgataaatctcctgcaacttcatgctctccgaaaattttcagcctgttgatctcggcatctccgagaaaaagtcccgtaccgaatatccggcagcgttcgctttgaagtccttcgccgacagttccttcccctttaatgcttacattttggtaggagccgccggaggcgtgtccggctccgtacatttttaaatgactcaatttttttgtcgtttccatcgcagttcctcctatcgtttcacgactttgttaaccaaagcggaaggatcacatgtaaaatcgccgctgtattccacagtcccaatggtgcagcctgcgccgatccgtacatgatttccgcggactgtcttcgcgttcgtgtccgccaattcaatgatgtcaccttcaatcagctccgctgtcagcaccggggccggcatcagcttaaaacgcgtaagcacgctctttctgctcatcactttcaaatggcggcagccgatctctttcacatggctttctcccgccgccagcttaatactgacttcatcggcattcagcaggccgccgatcttgcatttgccttccgaacggaacgtctctgtctcgcaatcgccttcaatcgcggctttcccggatatgaaaatatcatcagctttcacaccgccgccgaaagatgaaaatcccgcgacgttcagccgctccgttttgacatcacctttaatgacacccgttccattgatacggatggattcagcttcggcactgccggaaattttccccgaaccgctgatcgtcagcgtttgcgtcttgacatgtccgtctgtttttccgctgccgttaaacaaaaagctcgcgcactccacatcacctgacaccgtgccgcttccgttgatctctactgtatgaaaacggcctccttttgaacttcctgaaccgttgatgattaatttatctgttacttccattgatggtcctcctgcatccatttcgtttttaattcttccgatgccgcagcaagcgccacccgttcaaccactttgacagtcggttcaaataaaatatgttccgcgtctgcgatgaagcacgtcgttacgccaagctttcggagcatgacaagctccgtatttgctttcagttcggaagcctcatacgttttcagcacccctgccgccaattttccttcctcaaggctgatattgcccgatcgcaaaagtccttcaagcacatataaagacagcagcgcgcgggacgtgaatgtcacgccgtcttcgccataaacttgcagcgcggcttttgaaatcagtcccttttgaagcagctccgcagacgttatattgacatcagtcatttgcggagacagcatttctctcatttcatccaaagacagattttctttcattttctgtatttttgagatgcgttttaatatttccgctctcggaaaaaatgtttcctggcctgtaaatgttgattttcggataaaccattcttcaggaattaaatttttccgtttccagcggtacagctgcccgtatgaaattgatgtttcttccagcaattcttttttagaaatcagttgttcctccatgaatccagctccttcgatgaatgtattgtaacataacactgttacgttgttaagcccataaatataaaaacgccgtgaaccgctgctgtccgtcttttttattcaataaaaaaaacgcccggatgcgggcgttttttctcacgtcaaatctctgtaattttgctggcgcagcgcttcatatacaagaatcgcggccgtgttggacaggtttaatgatctcacatgctcggtcatcggcagacgcaggcagcggtccatattgttttcgatcaattctttcggaagtccgctcgtttctctgccgaatacgaagaaaaagtcttcctccgtatttgagtaatcaaatgatgtgtgcggcttttggccgaattttgtaatgaagaaaaactttccgttctcatatgcctcaaataactcttccaatgaatcatgatatacgacgttgacgaactcccaataatcgagtccggcgcgcttcagcattttatcatcggtcgagaatccgagcgggcggatcaaatgaagcgttgtgtctgttgccgcacaagtacgtgcgatatttcccgtattggccgggatttcgggttgatataaaacgacatgtaatgccacgatgttcacctctgttttttattccgcccaccattatatcattaattacacttttgtcgtatcatccgtaatatgaaaaaacgcatatctgatggaaggagtatacgccgttgaatcctcatatgaccaatatctcattctgctgtcatacgtttgggcattgacaagcggcatattgcttttatctttcgcgaccacgatcgccgtatgattaaaacggccgtccccttcaaaatcatagcaaatgatatctccgggcatcagttcttcggctcttgatacttgcaccgcgcgaagccctgccttggattgggccagatacatcttcatcgaatgcgcgaccgtccagctgtagctccacgagcttgccttcatccaccagcctgagcctctgttcggatgcccccgcatcggtgcttttccggcatgtaaacattgggaaataaaattggtgcagttgtcgctgaaattgttataagcgggatttcgtttattccaaaacttctccgcgtactgcacggcagccagacggtcgtatagaaacgcccgcccgaaatcttcccgttcactccgctcatattcaattacgctgtttccgtcagaaaatcccgccggttttttctttacttcccgatctttaatcaaaagctgatcatagagaaatgcagtccgctcctcaatctgctcttctaagtaaaggtgtccgtcatgctccttgcacaaatattcgaaatgaatcgtgtacatgacgcataacgtgccgtcgtcctcaaggctgcttttgacaatgacggcttttgccttcgctttcacaatgtcaactttccgtttttcaaacagctctttttttctcgtcaggacctcaagatcgccgggctgcccattgtgcctcatctcggttccgttgattaaataatgaagccgggcctccgctaaatcttcaataatatgcttcaagcgctccacccaccatactgttttataaagaaaaacacttgaactcacgccaagtgctttttctctatacatatgtcaggaccggccggttttagtcttatcagaaaccgataacagctccagtcccttttcaatttcccgtatggcgtccacatcctgctccttttgaagcgctttttctaattcccccgcataatcaggatcaccgattttcccgatggcccaggcggccgtccccctgataacagggcgcggatcttggtgcatcaaggccgttaattccggaagagacgaggcatctttaaaatgagccaaagctaaaatcgcattccgctgtatcggcttcttgccgcgccatgatcccgatacatgtccgaatttttctttgaattcgcggttgcttatggtcaaaagcggctttaacagcggctttgcgatttccggatcaggctccatctgcggatgaagatgaaaatctttccccttattaatcggacagaccgtctggcacgtgtcacagccatacagacggtttccgattttcgtgcggaactcatccggcaaaaatccctttgtctgggtcaggaacgaaatacagcgctgggcgttaagctgtccgggattgacgagtgcgccggtcggacacgcgtctaaacattttgtgcacgtaccgcacatatcttcaatcggcacatccggttcaaagggcagattggtgatcatttcagccagatagacgtaagagccgtattcaggcgtggtgatcatgcagtttttggcgctgaagccgattcccgcccgttcagccacggccctgtcggacaattctcctgtatccaccattgacttcgtgcggatatcctcatgtttgctttggagaaaattctccagcaggtcaagcttttccctcagcacgtcatgataatccttcccccaggaagctctgcaaaaaatgccgcgccgcccgtccctcgtgctcctcggcgcatctttcattttggaaggatacgcaagggcgatggcgacgattgatttggctttcgggagaagcaaagacggagtaacccgtttttcaatatccggctcttcaaaaccggataaatagccgagtgattcctgaagaatcagccggtcccgcagactgtcgaacgtatcagccgtcgtaaacccgattttgtcgactccgatgcttttggcgtattcgattaattcctctttcagtttatgaatattcattttttgcacagcctcctttctttgtgatcaggctcccgcacaggtataatagagttttatcatcccgaaatggagtgaacacacttgaacatcagtttagatccacttattgctgaacgggtgccggggatcaaagcggcagccgtcttatatgaacagatcgaagtcgggcctgctccgcaaatgctgaaaggccgcctccgtttatttcaagaatctctttactttgattatgctgacggcggtatagaagagcagccttttgtaaaagagttggcgcgtataatggaacagctcagtcccgccttttcaggacaaaaaacgccgatggagcttatgctcggcgatatttcccgggaacgattcattgaaagtgtgaattcagcccatgataccatactttttttctccttgaaatattcattgcctatcatggcgtatgacgccgcagaaatagatgaaccgatttcgattacgatcggagaaaaagaaagcgtactgtctttctccggcccggacggcgttttcggcgacttcaccggacatatcaatacacgccctgtcacgcccggcacaaggaaaatgctgcagctgatctttttcccgccttcatttcatgccgacgcggcggatgagctgctatcatccttaacaaaaatgtttgaacaaattcacggaggcacgcataccgtctcttggctttcataaaaagacacgccttcgtgtcttttttcacataaaaaaacgcaatacttcgtttatcagagaaacgaaacactgcgttaataacgtatgtatggagcgggtgatgagaatcgaactcacgacatcagcttggaaggctgaggttttaccactaaactacacccgcattaaaattattttttgtcagtaccgatttgatgtttctaatattacatgtttatttttttttcgtcaagggaatgttaaaaaatttgtcgaaaaaaattctttttttgtccacatgttaagttgggtttacattttgttaagagtctcatacaatataaaaaagaagaaaacttgaggtacgcctgatgatgaaaaataaagtaaaagagctgagagccagattcggctattctcaggaaacgctcggaaaagaagccggagccaccagacagacgattgcagcgattgaaaaaggagattatgtgccttcacttttattggcgcttaacatctgccgggctttctccctgccgatggaggaagttttctggctggaggaggagaaaaaatgagtttgaaaagaaaagcgtgttttcaccttgcactctacggattggcctgctggacgcttatttcctttatggaagcggcgccgcggatcgctcagtttttccaaacggaggggagcggttcatttgagctgaatatcactccgtttctgctgtttaccgtttgtgccgcattatatatctatactgaaaagaaaaaacggaacggcaaaaagcacaggcttgtgcccgatgaatttgaggaacaggatgaaagagaacgaatgatgacggctaaagcttgccgttcctcgtatatcgccgtttacttctcattgccggccgcagccgttctgcttttgttttatccgctgattcagccgcatctacccttttttccgattcttttgattttcattctgatgatgattcagcatttggcttatgctttcacttttcataagcacggcaaaaactccggttcatgacagatccggagttttttacattaccagctcgcttttttcaccccgggaatccggcctttatgggccagctccctgaatgcgattctggacagtttaaattttctcatatatccgcggggccgccccgtcaccgtacagcggttatgaagcctgcccggagcagaatcacgcggcagtttgctcagcgcttcccagtctccttttgcctttaattctcttcggatgtccgcatattgttcaacaagcttctgccgcttgagctctttgatcacttttgatttttttgccatttcagcactcctaacaaatcgtaataattacgttttgtatcatatcatccatatgagcatcgtgcaagctaagcgcttaaaaaggcgggtgaatacccgccttcactgccggcatttccccggaaatgaaaccgcagaaagcgctcgccgtcaattatccgccttgcgacgtcatcagactgtcgctttatttcctcttgcaaaatggtcgtttcccattgcttcacccagtctgcgctcaaactttttagtccgttcattctgaaacggcagaagcggaaacacgagttcagccagataataagcttcttccagatgcgggtagcctgaaaagataaacgactcaatgccgagtgcctgatactctaaaattcgagcagcgacagtctgcggatcaccgacaagcgccgtgcccgctccgcctctgaccagtccgatgccggcccagagattcgggctgatctcaagcttcgagcggtcaccgttatggagatcggccatccgtttttgtcccgaagaatcagcgcgccggagcgcagcctgcgctttcgcaatcgtctcttcgtctaaatggctgattaatcgttcagccgcttcccatgcctcttcctcagtctcccggacaatcacgtgaagtctgatgccaaaacgcatcgtccttccttccttggcagcctgttttttaacggtttcaatcttttcttttacctgctccggcggctctccccatgttaaatagacatctgtatgtttcgccgcagcctcaattcccgcctgtgatgaaccgccgaaatataatggcggatgcggagactgctttggcggaaacagcagattgctgttttccactttgatatggtccccttcatatgtcaccgtttcgccccgcatgagtccgcgccagacggttaaaaattcttcagtcgccttataacgttcatcgtggctgataaacataccgtctcccgccagttcataaggatctccgcccgctacgacatttacgagcaaacggccgtctgacagccgatccattgtcgacgccattctcgcggcgacagacggctgcatcagtcccggacggaccgccactaaaaatttcaagtcactcgtttcccccgctaaagcggcagccgtcagccacgggtcttcacatgatctcccggtcggcagcagcacccccgtatacccgagtctgtccgccgcctgtgccacttgcttaaaataaagatgatccgccgttctccctcccgtttgcgtccctaaataccggccgtcaccatgcgtcggaataaaccaaagaatctccatatgaatctctccttttttaataggttacccttcataactgttccgccattttaatagtttccgttcgagcattctgaccaatgcatctgtcagcttgccgacagccgcaaaaatgataatgccgacaaacaccttatttgtctgtgaaaattgtctggcatccataatcatataaccgacgccctcgctcgatcccatcagttccgccaccacgagaccgagccacgcaatgcccagagagagcctgatgccgagcagggtattcggcagagatgccggaagaattaatttcgtcatctgctgataccagttaaattccagcacccgcgcgacgtcaaacagcttcgcgtccacactgcggattccgagaaacgtattaatgtacacggggaaaaaagcccccaatgcgatcagcagaatttttgatgtctcatcaaacccgaaccacaaaataaacagaggagtcacggccaagtgcggaaccgttctgagcatttgaagagacggatcaagatatgcttccgtccgctttgagaaaccgaccagcagcccgaaaacaagtccgaggcccgcgccaagcagaaatccggcagccgccctgtataaactgatctctaaatgaccccacagttcacctgaaagaagaagttcctgaaacgtctgcaagatgacgacaggtgacgggagcaccgttgtcgagacgatgcccagacttgcgataacctgccatactgcgatgaccgcagccgggagtacaacccctttcatccattggtatgaatacttccgggatcttgccagagctttcttttctgattggcttattgcgccggcagccgttgatacttctgctttcattacttgccatcccccgtttcaagcgcttttttaataaatgaattgtcgacaacgtcttttacatgaattttcttatgaatcgcttttgtttgatattgaaaatcagcggtttcctgctgggctttgacaatatcatcattgatcggttcattgagaggctcagtattgttaagcacgtttctgacgactttcggatcaagatgtttgattttcgcatataaagagacagcttcatctttgtgttccttttgccatgcaactgctttattgaacactttcagaaatcggacaacctcatccgggtgttctttggaaaatcccgttctgactaacgtgaaaccgggagaatataaatctgtgctttctccgttcgccaatatttccgccccgtgctgcagcgtttcaatcgacaaatacggctcccaaatggaccatgcgttaactgatttgttttcaaaagcggaaaccgcctcatcaggctgaagctggatgatggtgacgtcatcggcggaaagccctgctttatctaaagctttatagagaaaatcaaagccgctgctgcctttggctacagcgatttttttacctttcaattctttcaggctctgaatcccgctgcccttgtttacgagaatgccatttgcctttaacccgtcctgagacagcccgatctctttaaaatcaattccagccgcctgaccggaaatgaccggtgaattgccgacctgggaaaaatcaagcttatcggcggcaagaccttcaaactgcggaggaccgctttgaaattcgacccattttacttttattccgtcttttttgaaggcctcttcaaaccagcctttttccttggcaatgagaagcgggcttaaactctgctggatgccgatccggatttctttcaccgttttcccgctccctcctgtcccgtctgcactgcatccggctgacatcatgactgctgcggctaaaagaatgatgatttttttcacttcgcttcgtcccttctatatcccggacccatccgcaaaccggaggtcttccgttttctcaaactcagaaagcaccttctgccggacggcctgaaaatccgctgaggtccgattgcgcggatgcggaagctgaatcggcatcaggctgtgcagccggccgggctttgccctgaggatcgccagcttatcgcctaaatagacggattcatcaatatcatgcgtgaccagaatcatcgtcgtttttttctcgctccatatatcaagcagcacatcctgcaaatgttttctcgtaaaagcgtcaagcgccccgaacggttcatctaaaagcagcacctccggctcgcgcaaaagggctctggcgatggcaacccgctgcgacatgccgccggataattcgcgcggataagcgttctccgctccctgcagcctgacaacctcaatcagatcatccacttttttccgaacggccgggtcgttcatattgagatcggcagcgatgttttgttttaccgtcagccagggaaacagccggtgctcctgaaagataaatccctgccggatgcccggtcccgatacattgcggccgtttattgtgacagagcctttataatcggtatcaagaccggcaatcaattttaaaagcgtgcttttgccgcatccgctcggcccgatgacagtcaaaaattctcccgatgcaattgacagctcaatatcattcagcaccggcgttttccggccttcatgctcaaaagctttttcttgtatgctgatggttacagccatctgtcttcccctctctttctgccgcgtgcgatcgaaaaacaaaaaggcccccatctccgattgcttgcagagatgggagccttcggcggtccgatcggcaacccgtttgtttttaaatttgaatatcatgttaattcaaattattccgacttgtcaactgttttttataaggattaaaatacgccctccggcataaccctgccagagagcgcatcggctgtatcacgtatttacttccttttcttgacgggcgattttcaataatgtccgcgcgttgttgccgaaaatgttctctatatcttcttcccgcatattgatttcccggcaggtcctcacctgctcctgaagatatctgtatacatatcctctcggaaatccgttcgaatccgtcccgaagatgatccgttcagcaccgattaattcagatgtcttccgaaacagaatttccaaatcaagcgggtacggcatccacctcatccactgatttgagccggacgtgtcaatatacacattcgggcagctccagcacagctgcagcagttcctgataatatccggcgccgaaatgcggaatgatgaacgggatatcagcatactctctcgcgacgcgatagatggagagcgggttgatgttgcgatggctgacaatgccccccgctcttcctaaaagcccgaagtgaattaatacaggcagccttttgtcagccagatacgtccacagctttttcagcgacggatcatgaaaatcgatgtctgtcagcggcccgaacagtttatatcctttcagaccgagctcttctaccgctcttttcagctcttcatacgcatcctcccgctccaaaggatgatatgcaaatccggtaaatctcgcgggattggcttgaataaacgccgccatccggtcattgctctctgctgttaaaaaattcagcacgtcaatgccatacttatctaattcattctcccatcttgtcatcaaagcgatttcgccgtcatcgccctcaacatcatgcggatcaggaaaatcccaagtcagattcattctttctgaccgctcccggttataatcggaaaatgtcttatcgtttttgccgaaataaaggctgtacggcagatgaccgtgaatatcgacaggtttaaaatgctgccggaaaagcatacaatcgccgcctcccttaccgcctgacaataaaaaaaggcccttatccagtgaagaataagagcctcttgtgtccaagtcagcggtttctattttttctcatcttaaacccattattcccgtcagtcaagtatgctttcaaacccaaacccttttttcgataataaaaataattattttataatcattataaaataatattgactttttaatgataggtgatattatatttttataaatctaaagaggtgatcacatgagttcaaataaattgacaaccagctggggcgctcctgtcggagataaccaaaactcaatgacggccggcgatcgcggtcctgctttaatacaagacgtccatctgcttgagaaattggcgcactttaacagagaacgcgttcccgagcgtgtcgttcacgcaaaaggcgcgggcgcacacggttattttgaagtcacaaatgacgttacaaaatatacgaaagccgcatttctgtcagaagtcggtaaacgcacgccgctcttcatccgtttctcaaccgttgcgggcgaactgggctctagtgacacagtgcgcgacccgcgcggatttgccgttaagttttatacagaagaaggaaactacgacatcgtcggaaacaatacacccgtgttcttcatccgcgatgccatcaagttccctgactttatccatacacaaaaaagagatccgagaacacatctgaaaaacccgacggccgtttgggatttctggtctctgtcaccggaatccctgcaccaggtcaccattctgatgtcagaccggggcattccggcgactcttcgccatatgcacggattcggaagccatacatttaaatggacaaatgataaaggcgaaggcgtctggatcaaatatcactttaaaacagagcaaggcgtgaaaaaccttgatgttaatacagccgcaaaaatcgcgggcgaaaatcccgattaccatacggaagatttgttcaatgcgattgaaaacggcgatttccccgcatggaaattatatgttcaaatcatgccgttagaagacgcaaacacatatcgctttgatccgtttgacgtcacaaaagtatggtctcaaaaagactatccgctcattgaagtcggccgcatggttctgaaccgcaatccggaaaattactttgcggaagtagaacaggcgacgttctctcccggcacattagtccccggcgtcgacgtctcacctgacaaaatgcttcaaggccggttgttcgcataccatgacgcgcatcgctaccgtgtcggcgcgaaccatcaggcgctgccgatcaaccgttcccgcaatgaagtgaaaaactatcagcgtgacggacaaatgcgttttgatgataacggcggccgctctgtctattacgagcctaacagcttcggcggcccgaaagagtcacctgaagataaacaggcggcatatcctgtatcaggtttcgctgacagtgtaagctataatcatcatgatcattacacacaagccggcgacctgtaccgcctgatgagcgaagaagagcgcgcgcgccttgtcgccaatatcgtcagtgcgatgaaacctgtggaaaaagaagaaattaagctgcgccagatcggccacttctacaaagctgatcctgaatacggcagacgcgttgccgaaggactcggactgccatcaccaaaataacatcaaaaaacctgccggtctgcccggcaggtttttcctgtttattatcaataaaaccgtttttttctcaattatacgaagtggcatgccgcaaaatgatgaagccctttttctgacagcgccggacttttctcagcacatatcttcttggctgccgggcatctcgttcggaatttacagcctgaaggcggatcagaggggctcggtatatcaccctttaaaattatccgctcccttttcgctccgggatcaggaacaggcacggctgataacagcgctttcgtataagggtgaagcggccgtgaaaagagctcctcctttgacgcgtattccacaatcgtccctaaatacataatggcgaccttcgtacataagtgctccaccacgcttaaatcatgagaaatgaacaaatatgacagcccgtgctgtttttgaaggctgctgaacaaattgatcatctgcgcctggatggagacatctaacgccgccacgggttcatccataatgataaattgcggcttgagcgccatcgctcttgcaatcacgatccgctgccgctgccctccggaaaattcatgcggataacggtcgataaagtttgcggaaagtccgcaggcttcaagaacttccgccgctttatcacgcgcattccgcttcaccgccaattgatgctcgatcatcgcttcaccaatggcttctccgatccggcgccggggatttaaagaactgaacggatcttgaaagatgagctgcgcttctgatctgaaagttttgagctcgcgccggctcatccgaaacacatcacgcccctgaaaaaacacctctcccgctgttttttcatgaagcctcaaaatggtcttgccgattgatgactttccgctgcccgattctcccgctaagccgaacacttctcccttttctatcgtaaaactgacaccgtcaaccgcttttacgggatttttgcgggtctttctcatccccccatgctcctcgtaatattttttcagccccttgacctccagcaacacatcactcatctgctttctcctctctgtaaagccagcacgccgcctgatgccccttcccgaattcagtaaaatgcgggctcgatctccggcatatttccgtgctgtgttcacatcgctccgcaaaataacaagacgatcccgacaggtccgcaagctcggggacctgccccggaatggtgtacagcatctcccttctttgaccgataaccggcttggccgcgagcagccctttcgtatacggatgcttcggatcagaaaacagctttgcaaccggtccttcctccacaatttttcccgcatacatgacaatcacataatcagccatttcagcaaccacgccaaggtcatgagtaatgaataaaatagacgtgcggaattgctttttcatatcccgcaataaatccaatatctgcgcctgaatggttacgtcaagcgctgtcgtcggctcgtcggcaatgatcaatttcggttcgcagcttagcgcgacagccgtcatgatgcgctgcagcatgccgccgctcagctcatgaggatatcggtgcataacctgctcggcatgcgggatctccactaacgtgatcagttcaacggccttccgccacgcttctttcttactcagcaacaaatgttcgcgaatcggttcggccagctgctcaccgattgtaaacaccggattcaaagatgtcatcggttcctgaaatatcatcccgatttcgctgccgcggattttctgcatgtcttttggtttcaattccaacaggttccgtccggaaaaatgcaccgctccccgttcgattctccccgtctcgggaataagctgcataatggacaatgacgccatgcttttcccgcagccggactcccctacaatacaaaccgtttcctcctcatgtatcgtaaagctgacatcgtccacggcctttaccgccccctcctctgtataaaaagccgtttccaaatgcatcacttctaaaagcggttttttcatttcattttcacctgccgttttaccttaggatcaaaagcgtctcttaaaccgtctccaagcagatgaatcgccacaacggtcagaaaaatggccgttcccggcggaatccacagccacggacggagtgtaaaatccataaaatgattcgcagcttccatcatgtttccccaagaaggtgtcggcggagcaacgccaagcccgagaaaactcagcgccgattcactcagcatcgctcccgccacatgcaaagtcgccgctaccagtaataacggcaatgtattgggaagcaaatgatagaggattttccgtttatcactaagccccaaaacttccgcggccatcataaacggctgctccttcagcgacaaaatctgtccgcgtacaagccgcgccagaccgggccatccgatcaagcttaacatcatcataatcaggtacattctgtgttcagaaggcactttccactccgacatcaccgcagccaaaatcaaaagcagcggcagtcccgggatggacatgagcatatcagcaatgcgcataatgatcatatcagcggctccccgataaaatccggccgcagccccgagtaaagaaccgatgacaagcgacagcaccattgaagcaagccccacagtcagagaaatctgccccgccagcatcagcctcgtcagcacatctctcccgtactggtcagttcccagccaatgatggattcccggctgctgattggcatttgaaatatccgtccgatctgttatgtacagagaaaaagacggcccgataaagcacaataaaaacataaaacataagaaaagaagactgatgaccgtcagcttatgctgcagcaggcggcggtacgtctgcttccaaagagaaggcggcacccctttttgttttttcattccgaacaccccctatttcagcctgacccgcggatcaaccgcggcataagcgatatccgccaagaagttccccacaatcgttaaacaagacaaaaacaaggtaaacgccatcaaaaccggataatcacgataatgcacagattccagctgaatacgtccgacacccggccacccgaaaatctgttcaataatgatggctccggaaaacagtcccggcagttcaaaagcaagcagagtgatggccggaatgagcgcgtttttcaacgcatgtttccagatgacggtgcgctctttcaatcccttcgctctcgccgttctgatataatcctgtctgatcacgtccagcatgccggagcggaaataccttgtcagcgagccgatgccgagcatagataaaatcacgaccggaagaatcatatgtctggcggcttcaagcacgtacgaaaaacctgtactcgtgcttccggtatcaatcatcccgccgacgggcaatattttcaaatccaccccaaaccacttaataaacagaaggctgataaaaaaagacgggaacgccatggaagcaaaaacaagaaacgtcacgatcccgtcaaaccatgagtatttcctgacagcggatatgacacccgttatcatcgcggctgaccatgtgacaagcaacgccaaaaacgcgacaaaaaacgaattccagacatatttccgaagcagtgacaggacgttctcctgatatttcaaagaaaacccaaaatctccgctgagcacatttccgagccatgtcacatagcgctgccaaatcggctgatccagcccgtaaagcgcttttaactcctgcgctctttcaggagtcaggtttacattggaatcaatatagtcgcccggcagcatggcgaataagaaaaaaataataaaggacgtaccgaataagatcacaagcatttgaatgaatcgttctgcggcataccgtttcacaaaaagcccctcctttccgctgaaagggcaaaatccccgggatgcaccgggtattttgcccaaccgttctattgaattgagacatttgagagacttgaactgattccagaataattgtcaggctcaagcccttttatttttccgctgaccgcccttgcgctctgacggtaatgaatcagaatgtaaggcgggttttccccgagctcccggtacagctggtgataaatctcttttcttttgctgatatcaagcgtgccggctcctttctctatcagccggtccgcttttggattggaataccccgttacattattgggatggccggaagccagcttttccaccgtgtcattcggatcaagaatctgcgaggtggaaacggcggcaaggtcatattgtttgtcatttattttcgctacttctgtattaaaatccatcacttccggttttaatgagattccgatgtccgcgtaattttctttcgcgatcgggatgaaatcatcatctgctttagacgtgtaatagctgatttcaagctttttgccgtttttttcacgtacaccgtctttgcccgttttccagcctgcttcatcgagaagctttttggctttttcagggttaaacgcgtaccgattgacatctttgtcatcataagcccacgaaaccggagacaccggcacattcgcgacttctccgtagcgtttaaagcggacatcgacgattttttgacggtcaagtccgtaaataagcgcctgggacacttccttatcttgaaaaggcggacgcttgtgattgacgtacacaagcccgtaatcattcacgacagatacgcttatattggcaaaaccgagactttttaaatgctgaaccgtatcatcatcaggtgaaaaagaagcgtaatcaaggtcacccgtttcaaacagctgaagggaagttgacggatcgataattttataaatcagcttttccgttttcggttttcctgcataatagtgttcattagcctgatagcgtatttcctgtcccggaaggtattctgtaaattgataaggtcccgctccgagcggtttggcataaagctcttttaaatagtccagtttgccgaattgataattctttccgtagtaggcttctgacagcacctgcccgcccaaaagaagcagcgacttcgcactgactttctcagtcgtgatttgaatggttctgtcatcaaggacacgaatgccctctatcgtctttgcctttccttctttgtaagccttaccgcctttaatataagccgtggtgatatcttcatagcccgcgtatgcaggatcatgcaacagtgttaaagtgaatgcggcatcctttgcggtcagcggtgaaccgtcgctgaaaacgagattttttcttaaacggaacgtgtatgtaagctgatctttggaaattttccagctttccgcaagagccggggcaggcttccccgttttatccagtttgactaacggttcaaaaataggatctgtcgcatttccgtcccagccgttttcgtaaaagtacggcagaaacacaccgcccggcgcggaaatcccagcaacaaaagtgtcagttctggctttcgatttagcgggaatcgccgccggatgagaagctttaaattcctttgtcttgacatgggcaatacgtgtttcttcctttttatccgccgcagatgacggttcttccccggcgctccctaacgcgcaccctgataacatgatggataccgacagcgcgagtaccgttgtttttatcctccattttctctccttcatctttatcgaacccccgcatgcttttcatctatctttatataaatctgctccatctgttcctcatttctcataatctcccgtttgtttttctctacaagcagttcgaaattcaatgtgtgttttctatacttttttcgttttttgctctttttgcgcacatgtgataccttttttaacgccacttttcatccctccgctcttcatttcattcatgactttcacgcaaaaaaggcccttatctgtttaaaagataagagccttcggtgatccgatcagccatcgtttggaaatatgtaatgattatgttaattcatacaatacctacctgtcaactacaatttaaaatatcgtttccttccgggggttttcctcatacactctctcatttttccgcatatgctagaaaacatagcagagtacaagtgaaagtgagtgagaatgtggaaaagacaacattgaccggccgcatcgtcaaaaaagatgacccggactataatgctgcgagaaccaatatcaatttaagcctgcaaagatatccagacatcattgtgttttgtcaaaacaaacatgacgccctcaatgcggtgagatgggcgcgtgagaacaatgtgcctttccgtatcagaggcggaagacacagctacgaaaatttttccctgttaaatgacggactagtcattgatctcagtgaaatgaagaaaataagagtaaatgaggataagcggctggtctcgattgaagcgggagccgaattgggggaagtctaccggacactttggcggtacggcttgactcttcctgcgggaaccattgcgaatgtgggaatcacggggctgacgctcgggggaggaatcggatatttaacaaggacagccggacttacttgcgatcgtctcctccagctcgaaatgatcatagcggacgaaaaagcgggtgctgacttgatcacagtcaaccgttcaaagcactctgatctattttgggcgtctcagggaggagggggaggcaacttcggcattgtcacatccatgatgtttaaagccgtaccgatctcgtgcgtgtctgttttttctgtcacttggggctgggatgattttgaggaagtatttaacacatggcagcgctgggctccatttatagacaaccggcttacctcatcaattcagttttggcctaaggaagtaaaccgcatagaagcgctcggtcaatttaccgggacaaaagatgagctgaaagaactgctggctccgttaatgaaagcgggaaaaccgacaagcggcatggtcaagacagtgccatttattaaagcggcagccttttttaacagcccgggaggcaatcagccgcaaaagatgaagcggtcaggatcctttattgaaaaaccattatcaacacgcgcaatatccactttaaagcgctatttagagcacgctccgaacgaaaacgccagtgtctggcagcaatctctcggcggggcggccggacggatcgctccggaccaaacggcattctactatcgcaacgcaatcattgcccaagaatatattacaacttggacatctgctgaagaagaaagacaaaatgtccgctggatcgaaggactgagaacgtccctatcaagagaaacgatgggagattacgtgaattggcctgatagagaaatcagaaactggctgcaaacgtattacggagaaaatgttcaccgcctccgtcaagtcaaaacgaaatacgatccggaaaatatattccgctttgaacagagcattccgccgcttcgccgttcaccgtttttctaaaaaagatgaagatgggcaaactccatcttcatcttttcttttattgatataagcggcttcccttctctgcaaactcttttgctttttctttcagcccttcgttgacggcctcgtcttcagtaagtccgttttccttcgcataatcacgaatatcctgagaaattctcatactgcagaacttcggaccgcacatcgaacagaagtgagctgtttttgcgccttcagccggcagcgtttcatcatgatattccattgctctttcaggatcaagcgacaaatgaaattgatcacgccaccggaattcaaaccgcgccttagacagagcatcgtcacggatctgtgcacccggatgccctttagcaaggtctgcggcatgtgccgcgattttgtacgtaatgacgccttctcttacatcatcacgattcggcagccccaaatgctccttcggcgtgacatagcaaagcatcgccgtcccgtaccagccgatcatcgccgcgccgattgctgaagtaatgtggtcataacccggagcgatatccgtcgttaatggcccgagcgtgtaaaaaggcgcctctttacaaatttccagctgcttgtccatgttttccttaattttatgcatcggcacatgacccggtccttcgatcatcacttgcacatcgtgcttccacgcaatctccgtcaattctccgagagtctccaattccgcaaactgcgcttcatcattggcatccgcaatcgaaccggggcgaagcccgtcaccaagagaaaaagcgatatcataggccttcatgatttcacaaatttcttcaaaatgcgtgtacagaaagctttcctgatgatgagccaggcaccattgcgccataatcgccccgccgcgggatacgattcccgtcgtgcgtttagccgttaacggaacgtaacgaagcagtacgccggcatggatggtgaaataatccacgccctgctccgcctgctcaatcaatgtgtcacgataaatgtcccacgttaaatcctcggcaatgccattaactttttcaagcgcctgataaatcggcaccgtccccacaggcacggggcagttgcggataatccattcacgcgtcgtatgaatgtcttttcccgtggataagtccatcatcgtatcggcgccccagcgaatcgcccacgtcattttttcgacttcttcttcgatagaagatgtaacagccgagttgccgatatttgcattgattttcacatgaaaattccggccgataatcatcggctcgctttccgggtggttgacgttagaaggaataatcgcccgtccgctcgccacctcttccctgacaaattcgggagacacatgctcacgtattgcgataaactccatttccggcgtaatgatgccttttctcgcataatgcaattgtgttacatttttccccggcttggcccgaagcggtttccgctgtaggccggggtattcggcggcacggccctcttttttatagccgttgtcttcaggtctcacggtccggccgttatattcttctacatctccgcgcccggtaatccactttgtgcggagcgcccccagcccttcatgaatatcaatctgtacatccgggtctgtatacggcccgctcgtatcataaacacggaccggcgcattctcctcttccccgaatgcccctgtagtcgcactcaggctgatttcccgcatcggcactcgtatatcgggcgaagaaccttctgtataaacctttttactgccggaaaaactcgacataatggaaatgttcgcttgctgtactgattgattttgcatacaaatctctcctttatcatttgaataacagaaccaagctcagcaccagcacaaaaaaaccgggttcaaagaagaacccggtttttgcagtcagaaagaaactattattgttttcatcaacaataataaaacgtttacttccccacgctggtacgaaccagatcaggtccaaagggttaagaagccgccgcttctctctcagcccgctcagacgggcacccccagtaactattgatttcgctctcatcgtaacataagttgtgtacaaaaaaaagcatattatcaaaattcagataacggtacggtcataagctctgtttcccgaacgcctttttcggtattaaaaacccgataaccctttgcggtttcccgggaagagacagcccggaacagctgaccgtctttataatgaagcgcagcgccgtcatcagcggcataaccctccctgagtttcatttctgaaatcagacggtgatacaccggccggcgctccgcttctccgtcatagtgcggacaaaagcttcccggcaaaaatcctaaagctcttaactctctcaaatctccagccgaatccgtcaatccttcttcataccagcaaatcgccccggcgctgagacccgccaacatgatgccgttttcccaagcctcacgaagaataaggtcaatcccccactctttccataagacaagcatattgcgcgtatttccgccgccgacatatataatatctttcttcatgagaaaggatctgagatcagaacccggcggtttaaacagcgacaagtgatccggctcacaccgcagcttttgaaaggcctgataaaacctgccgatataattctccgaatctccgcttgccgtcggcaaaaaacaaattttcggctctgaccgcgccgactgctctaaaatatactgatccagcacaagatgatccggctccatggaaaagcccccgccgcccattgcaataatctgcttcaatgtcatcacctcttttttcctctagtataacagctcataaaaaggcgttatcccaatttcggataccgcctttaaaaagtatttgttatctgaaaaatgaaaacgcaccgtataacacaacggagatccccgcggcgataagcgctggaacaagcttcgaacgggcatacttcacaacatcgatccccaacaccgtacaggttgtcaccgtattatcactgagaggagaagcaaacgctccaaatgttccgctcgcaaacacggccccgatcgctaataataagctggtatgtgactgaaccgccagcgttacgccgagcggcattaatagcccccaagtcccccaggatgacccgataaaataggatataacagcccccagtataaaaagagacggcgcaataaacatatgagggatccatgacgttaaatgagaagtaacatatttcgagaatccaaggtcttcagatactgctgttacggcccaaatcagcgataacataataataacgttgaccaattcgtttccgcccttaataaaatgggtaacaagctcgcctgcatgaaaacgctgaaacataaaaagagcaaatgctgcaataaccgctgccaataatgcggttaacatgacgccaagcatatcgcttttgataaaagcattcaaaaacccttgtgcttttgaatggccgtcccaccagctgagaaagagtgttaatagcaaaaacagcccgatcggaatgattaaattccacggccgaatcggtgtttccttaatataagcacggtgcgccgaatccagctcctcctgctggtcagcatgctcatcacttttgaacattcccgtatgttcaccgtgaaaatctgagatcgtccctgtttccatgttgaatgaacctgagccttttgaaagcaacacaccgctgttccgcggaatcggttccgtatttttgttatgtttgcgagcagaagtttgtccgctcttttctgttttttctaagctttcgtccgctttttgtttcttaaaaaagcagtaataaattccgactactataatcacaatggagaaaaaattgaagggaatacttttcacatacaccgtgtaagccggctgatctattcctgacgttttaagggcctgtccgataatggaaaccatgtagccgacaaatgccgttgctatcggaatcaaggcaatgacagggtttgccgtaaactcaatggcatacgcaattttctgtttcgacaggtccagacgcttgcttaaagctttcatgatcggtgcaattgtgacgatgcgaaagtccggttcactgaacgtgccaaatgtcgacagccatgcaagcagcatcgcaccttttttggttttaacttttttactgatcaaatggacgaatccttttatcccgccggtcagctttataatccctacaaggccggcaaatgaatatagaaacacaatgattctaatattattggtgacgacaatgttgctgattacatattgaaccatatgctcaatcccgccaagcaagctgggatgcaaaagatagcttccgaccagcaaaccgacaaacagaccggactgcacttgctttgtaatgattgaaatgggaatgaccagaataaatgggataagacaagcccaagtcccttccataaaaaacacctctttcaaagaacttcttgttagtatctttgaaaaaagcggatttatacaattgctcgcgtatcatgttttcacaagccttggaggatattttcacacaacaaaaaaggcttctacatattgtagaagcctttgtataccggtggccggggtcgaaccggcactccagaaggaacacgattttgagtcgaaaagttccttctgcacctaattttattatcgttaatttcccggtggtattaagtaattctgcagataatttaagtctagaataattttgtattaacacgacttgttcttaacaatactatattctgcagagataaataaagaatatttttgtgcattatgttaccagggacaatattgtaacgttagacatgttttaaaattattgcctttatctcttcataaacttcaatattctcaaattctaaatcatctagattatgataaatttttctttcaaggataatccagtaggtgcttccttttttcattttattttgtacgaaacctcttaagttatctcctattgcttcttcaattgaaaaatctttaaagaatgacctaagcgttctattagtaatcagtaacaattgcttattaaggttctgattattaaagatatctttaaaaacttcaacatttattttgtcggcagaatcgtattccttatctgcatgtttattgaccatttctgtaattagtaaataatatgttgcaataaaaaggaatgctgaattaactctaaagtcatttgatccactcttatattttagttcttctttagcatacattaaaattaaataaggaaagagaaaatgttctaaaggtagacctttagtttcttcattcattatatctttccacctactacctactggagtcaattcgttagctcgcccataagctacattcggcattagttttatagcagctgtaaaagattgaattacttcttttgcaggcagaacgtattttttctttctattaacacttccaagcaaataattataactatcattacctctataggactcttgttcttttcgatctaaagttatgaatgcccctctttgtatttcataaaaataacccaaatttttcattcgatcttttaagccattttgaaatctgtctaaagcataaaaatccagccctctaacagcattttggctatttgtgtaccttgtaatattgtctcttaactctttcttttgagattcctcagcacttcgtttagttttaatcactttcacaagcaagtgtccattggattctaaagcagagagttctttattggtcttgtgcttatagaaatcccccagagttttggcagtttggcacccattaactatttgcggtgctttcattactaaactccccatagtctcatagtactcatcacaaaccacagtaaccccattattgtaataccaaaagttctcaggttcatttcttatagtatctttaatacctttgttaattttagtactctttagatagtttcttatatttgaatggaagagaaggttttcaccttcgttaacaaattgagaaaagtctttaactcttacttttgctacagtcgtttcgaaagtagagaaattctcttctatattcaacctgaacgttttttcacgaaagtcttttggtaacagtcccttttttatttctatactttcctgaatatcatctaaatcatgtaagaagaaatttaaattcttaaattccatactaagatgttttaagttggattttatttgcactctttcccaatcacttatatggttgttcgtaatatagtaacaatttatagtctcatcattctgatatgactctctaacatttttacatgcttcttttacagaatctctttctgtagttggttcttctatacaaactcgttggcaatcagctataaacctttgtgtggagtcaatattatgggatgtcttatacttactttgtaataagtgaacttcaccgttatattcaaaaaccgcgtctaaaccgttatcaaacttcccacctatttctttagcttctgctacttcgtcttctcttaactcgaatatgttataaagtatccactcacaaaaactgtccccgacacttacagagtcattacttccacgctcactaagatactcttctatagattcttcaatttgattttgtaaaattaggtcgtatttgttcttttttgctacacccacactcatctctccttaggtaataacttcacaggataattttaacactaaatctcttaaaaaagcacgtaaagcccttaagcgagcattgatagtaattatcctgttccctttataattcttcatgtacagtattacattttcctttgcgtgttcttcagtaaagttgtacggatttaatagttgagtatctattctttgatctcttaagtttatcaaaaaagcactaaattcattcgtgtattattttatagtgtgtgatcttaaattttcgcaactcacagtttattgcctcctgaaatgattctacatatgactttgtttcgctttctaagatacccaatcccttttcgtctaagatgtttttacatctagccatcatgacaattcctctttctctgtgaacacgattagtgcacacgatttgaaattatattgtcatgtgaataaaagccattaaaacaagaaaaaacgccttcctacactactgtagaaagacgttaaaaacgttaatattacttaattcttctttaattgacgttttataaagttaataccggtggccggggtcgaaccggcactccagaaggaacacgattttgagtcgtgcgcgtctgccaattccgccacaccggcatgtaattcgtcgtgttcaaccgacgtatataaatataacatgtatttcataaaacgtcaacggttttagcaaagttttttaaaaggtaatgcagtatatacgatacaagcaagaaacttatattgatagtcattacgtttttattatataaaaaaagtgatctgcaatatgcaaatcactctcatatatgttttataatgtgaaaactgatgaccaatttaacatagttcgttcaaagttaaattggtgccgagggccggacttgaaccggcacggtagtcacctaccgcaggattttaagtcctgtgtgtctgccaattccaccaccccggcaatagaaaggcgacacccggattcgaaccggggataaaggttttgcagacctctgccttaccacttggctatgccgccgtaatttggagcggaagacgggattcgaacccgcgacccccaccttggcaaggtgatgttctaccactgaactacttccgcaacatgtaaaagaacttaatacatgttatgctgttgtttttaaaaaaatgcaactgggctagctggattcgaaccaacgcatgacggagtcaaagtccgttgccttaccgcttggctatagcccaatgataaaatggggcgattgatgggaatcgaacccacgagtgccagagccacaatctggtgcgttaaccacttcgccacaaccgccataatctgaagatgaataaataaaatagtggcaggggcagtaggaatcgaacccacaccggaggttttggagacctctgttctaccgttaaactatgcccctatttataaaatggtggaggggggcagattcgaactgccgaaccctgagggagcggatttacagtccgccgcgtttagccacttcgctacccctccatcatttagagtgccggccagaggacttgaacccccaacctactgattacaagtcagttgctctaccaattgagctagaccggcaaatggtggctcgggacggaatcgaaccgccgacacacggattttcagtccgttgctctaccaactgagctaccgagcctttttataaatggcggtccggacgggactcgaacccgcgacctcctgcgtgacaggcaggcattctaaccaactgaactaccggaccatttttttggttgcgggggcaggatttgaacctgcgaccttcgggttatgagcccgacgagctaccgaactgctccaccccgcgatgataatggtggaggatgacgggctcgaaccgccgaccctctgcttgtaaggcagatgctctcccagctgagctaatcctccatcatataagtgacccgtacgggattcgaacccgtgttaccgccgtgaaagggcggtgtcttaaccgcttgaccaacgggccctggtattttttcgtttgttatgtattgataattagtggcggagagcaagggattcgaacccttgagacggggttaccgcctacacgatttccaatcgtgctccttcggccactcggacagctctccataaatggctccgcaggtaggattcgaacctacgaccgatcggttaacagccgatagctctaccactgagctactgcggaatgaagtctgcctggcgatgtcctactctcacagggggaaccccccgactaccatcggcgctgaagagcttaacttccgtgttcggcatgggaacgggtgtgacctcttcgccatcatcaccagacgttttagtgacatgtattattatactatgtatttcagaaaaagcaagagtttttttaaaaattctctcaaaactagataacagtaagcatacattcaaattggttaagtcctcgatcgattagtatctgtcagctccatgtgtcgccacacttccacctcagacctatcaacctgatcatctttcagggatcttacttccttgcggaatgggaaatctcatcttgaggggggcttcatgcttagatgctttcagcacttatcccgtccgcacatagctacccagcgatgcccttggcagaacaactggtacaccagcggtgcgtccatcccggtcctctcgtactaaggacagctcctctcaaatttcctgcgcccgcgacggatagggaccgaactgtctcacgacgttctgaacccagctcgcgtaccgctttaatgggcgaacagcccaacccttgggaccgactacagccccaggatgcgatgagccgacatcgaggtgccaaacctccccgtcgatgtggactcttgggggagataagcctgttatccccggggtagcttttatccgttgagcgatggcccttccatgcggaaccaccggatcactaagcccgactttcgtccctgctcgacttgtaggtctcgcagtcaagctccgccatatgccgtggtcgataatatattggatcggaactttcagtctgatcgtcctcttgaaaaactagtaacggacatcacatatttgccttatggacagaaacaattgtacctttccagtatattagatttatacaatggagaagtgattgcttttactattggggataagcaggacacagcctttgtcttagacacacttgatcagctaccaatgctgcctgagaactgcgtgttacatagtgaccaaggttctgtgtatacatcttacgagtatcaaaaagctgttaaaacaaaaggcattaccatgagcatgtcccgcaaagggacgcccgctgataatgcctccatcgaatcgtttcattcctcgctaaagtctgaaacgttctatcttaacagcattgatcgaactacgactgccatcgtagaacgcactgtcatagaatacattcattattataacaatattcgtattcaaaccaaactaaacaaccaatcaccgataaactatcggcaattggctgtttaaaaggtgttttgacccctgtctcaaaaacggggggcagtcccctagtcatcctactttttatcttcttccaagtagtataaataaccatctcatataatcactacattatgaaaacgtaattctgaattatactttattatgattttttcttttaaacataggaaactgcaccaataaatttaaatgaatagttttttgcagttatttctttctccctgccgtcatattcaaaattatataaaagaacagcagcattgatttgatcagggagtgtggtacctactatgtcttcgaaacgaggtaagatgacactatcgtatgaacagccgtcaattagtgcaggtaaattgttacgattattttcatgtgcaactttttctataaaatcttcatctaaatcatcgatatctatatcaaagtcaattaaaaattgggaaggaagaaaatcaccctcatcttcattgtaaactaattcaacatatttacctaatgattcattatcctttatacttccgatccacaatgatacgtaattttgacgttccatataaacctcctattatttaatcctcaatccttttggcagggcttccactccacctttaagtctatagtttgcccaattattcaaccttcggacaaatatattatagtttagagatgaatcaataattcccagcaattcattatgggcagctgtagagcccaatcccccgtgtttaccaacaggatttacgaactcaacttcgtttatggcagttcttaaatctcttatttgttccgctgtaatattccaatgtttaaaggtaggagctcgggaaactaaatgccattcgtgcattccaccgggtgctcttagttgtctttcaattgctcttctaactcttttatctgcccaaagttcatcaagttgttttgtggttaatgagttgaaccaattattaaattcaccactttttactgtaggaactattgtttttctaggtttctttacattctgggtttttattatctcagtttcttgtaaagctttcgacttctgtccttcaatctctttcttcaaaagcggtgtatttttcacattatgcgtattctcaatatcctggacaattcctgcaaaagctggttgatttccttttgataatgaattggtgaaatctttagttttctggatacctgtcttcacatgttttgcagctgctttttctccagcttccaagacgttatccactttggcggcgcctgtttttgcgagcttgcttgttacttttacagctgaaccggaacctttgagtcccacaatgctcccgatggcgtaggtgatgtaatgtgatcttgaatacgcatccccgttaaccattttatcattccacgaatccgccaggtttgtccatatgatttttgcgtaggagggcgtgttcaatacagctgatatggttttagcgactttttgttcatcagagagatggtaaaaatcccatgcgccgacagcgagatctttgacgccggttatggtgtctttcccgacatcataaaggccgacgcctattcctttaacgatatcccaagccgtttctccgacttcttctagctgttttgcttgttcaagctgcatcacatatcccacctgagcgggttcaaggttttcatagccgattttcttcgcgatttctaagtattcatccgggtcggttacaccatcagccagctttttcttcagatccttgatttcacgctctttcgcttcttcctttttaatcgtcaaataagcatccgagtgccttgcgatatcgccttttttcttatgaatatcactttcacggtacgctttggcgttgtagtgaagcggcgtggcgctttttcctttgcctgtggcgttttgaagctgctgaaagtcggcttggatgaaatgttcgttcgcttcggtttctgtgtattccttcgttagatcgtgatcaagcttcccgagcttatgtatggtttcgcttctttttttgtcagctgaagaaagcttctgatctgtgctttcggttgaaaacagatcaagcgagatgatgtcttcgatctctctgaggatggaccccatgtcctttttttgcccttccataattgcctttgatttactgagggcgtgggtgagctcatgctccagaaatgattcctccacatgcgaattgaaaagtccggcgtcttcgaccttgccgggaaggcttgtgagaaatgcgattttcatgtcgatcagatcaagccagctgtctgtgacgccggcgtgatccttaaaaaaagctttgatgttgtcagcgccccggcctgaaaagtcgctgtcaccgaggtcagccataccttgaaacgctttttttagattgaccatctgaccgcgcagttttttatattcacccgcgcgctgtttggcggcggcgaggagggtggttgcttcgaaaactttcatgaccatatcctttcttttgttcgatatcaaaattttaccacgtgagtcaggatatacagtgtaggaaataggtaataagaataaaatgaatcttttggcttgcgacttccttcctgtatgaagggaggctttttatgttttgtataataaccctcacattcggcttactgcgctccggtgattttaagcgtgcctgttttttctaatgtcttacactcgaaacaacccaaccgctgaggtataatagaagcagagtatttatcatacagattcaattcgtgaaagagagtggaacaaaatgggccgtaagtggaacaatattaaagaaaagaaagcatcaaaggacgcaaatacgagccggatttacgcgaagttcggccgtgagatttatgtggcggcaaaacaaggcgagccagatccggaatcgaaccaggcgttaaaagtggtgcttgagcgtgcgaagacgtacagcgtgccgaaaaatattattgagcgtgcgattgaaaaggcgaaaggcggcgcggaggagaactttgacgagctgcgttacgaaggtttcgggccgaacggttcaatgatcatcgttgatgcgttaacgaataatgtaaaccgcacggcgcctgaagtgcgcgccgcattcgggaaaaacggcggaaatatgggtgtgagcgggtctgtcgcttacatgttcgatgcgactgccgttatcggcgttgaaggcaagacggcggatgaagcgctggaattgctgatggaagctgatgtggacgttcgcgatattttagaagaggatgacagtgtgatcgtgtatgccgagcctgaccaattccatgccgtgcaggaggcattcaaaaatgccggcgttgaagagttcaccgttgcggagctgacgatgcttgcgcaaaatgaagtcgagcttccggaagatgcgaaagctcaatttgaaaagctgatcgatgtgctggaagacctcgaagacgtacagcaggtttatcacaatgtagatttaggcgaataaagacaaaaaggccggggcggcataagttccggcctttttattttgcttaagcggtcggcctgtatcgtatttttctccgtaagcaattattgattatttcgccaaaactgggcggatgcccatacgtttccttccggatgtcataaactggactgtaacctatgtgaaggagcgataaatcatgaatgaaagaagaccgatttacggcggaggctttggcggcggctatggaggcttcggaggctacccggggtacggttttggcggctacggcggctacggaggatatccaggatacggtttcggcggaggctacggatacccgggatacggttttggcggttacggcggttttggcggctacggcggctacggaggcttcgggggatatccggggtacggttttggcggctatggcggaggctacggcggctacccgttccatcatcatcatcatcgggaaagccaatatatctgaccattcgggaaaaagcactcttggaacagcaagagtgtttttttgtgaccgtttctaagcgctggcttttcttattttcttacagggcataaatgccgatacggattcatacctattaaggtcatgtgtttaggaaaggaggatcgtaatgaaagaaaatcagccgtttacaccggtcaaatcctataaacccttccacagccggtttgatccctgcccgccgatcggaagaaaatacttcagaacgccgccgcatctttatatgcggtttcagccgtatcacttggagcagttttctccgatggaggcattgagaaaagggaccctttggaaggatctttacgatttctatgataatccttatcgggggggaatcgaatatggcgaaaaagattgatgatgaatattatcggctgctggagcaaattcaggcggcggactttgtcttggtggagctgacgctttatctggatacgcatccccatgaccgtctcgcgcttcagcagtttcatgaatattcccggtactcaagacagctgagaaagcggtttgagcctgagtacggaccgcttctgcaattcggcgtgagtcaggtcggcgctcaatgggactggggccgcggtccttggccatggcaagtataaggagggatctgtaaatgtgggtatatgaaaaaaagctgcagtatccggttaaagtcagtacatgcaacccgatgctggctaagtttctcattgaacaatacggcggggcggacggcgaattggccgcagcgctccggtacttaaaccagcgctacacgattcctgacaaggtgatcggcctgctgacggatatcggcacggaggagtttgcgcatttagaaatgattgcgacgatgatttataagctgacaaaagatgcgaccccggagcagctgcgtgatgcagggctcagtgatcattacgtcaaccatgacagcgcgctgttttatcacaatgcggccggagttccgttcacagcgtcttacatacaggcgaagggagatccgatcgctgatttatatgaggatattgcggctgaagaaaaggcgagagcgacgtatcaatggattattgatatttccgatgatcctgacctgaatgattcactccgttttctgcgtgagcgtgaaatcgtccactctatgcgtttcagggaagcggttgagattttaaaagaagaacgtgataagaagaaaattttttaaacggccctcaaacacgacggctgtttttttcctttctgcgtttggtctataataaaggtgtcgaatattctgattacaggaggattttatgacaccttttacgatcacggaggagaaggcgggggcattccgggtcacccccgcccggaaagatgatgcaaaagaggtcatggatctgctcgtgcaagcggcagaatggcttcgcgataaaggatcgaaccagtggagcggccttctgcaaggggaagatacccacaatatgcgggaggcgatcgcccaagggtgtgtttttttattcaggcagaatgaagagctggccggcgtcgtcatgctgcttcccgaagcaagcgggtgggacagacgtctttggggcgatgaaggacatgaggagtccgtatatctccaccggctggcgattgacaggcggtttgcaggggcggggctcggccggacaatcatgacttgggcggagacgggtgtgtcttgtccgggaaaaacgaaaatccggctcgattgcgtgtccgaaaacaaggcgcttcagtcgttttacagcggaatggggtacgaaccaaaaggatccgcgccgggttatcatttgtttgaaaaaaaggtgagtaaataaaaagcttctcatgacggaggtaaaagacatggggtttttttatctgatctgtctggccgcattttgtcttaactttgccgtatcggctgtgctccgcaagaaatggccgaaaaagatgtggcctgagtgccttttggcggtgctgggcctgactgctttcggtacggttgtttacagcattttcggtgtcggcggctgggaaggaatgggcttggggcttgccgcgatgtttgcgggttccggagcggccgccggttatgccgctgaggtgtgcttacgggtcgtcagatcgaatcgaaaacagtaagcagaagtgaaaaaacgcggcctcggctgcgttttttttgtgtgttgccggccgctgtatagaaaacaggcgaatgtccataatggtaatgacttttaagaagaaggtgcgaatatgggacatttacttacagtggcttgggagttagtatgcggtttgggtattttatttgtgattttaaaattgcttggaaaaactcaattctcgcaaattacgccgtttgattttatttccgcgctcatcctcggcgaactggtcggaaatgcggtgtatgataaaggcgtcaggatttttgaaatcatttttgcctctctgttatgggggattttaatttatctcatcgaactgattacgcagaaagtaaaaagctccagaaagctgttggaaggcgagccgagtattatcatacataaaggaaaactgaaatatgatgtgctgaaaaagaataagctggacattaatcaattgcaaagccttctcagacaggcgaattgcttttccatacaggaagcggagtacgcgattttagaaacaaacgggatggtcagcgtcctgccgaaatttcaatatgacacgacgaaaaacggcgacatgcaaataaagccgaagcaggtctctttgccggtcacgctgattattgacggcgaagtgctgtatgaaaatctgaaagaagccgggctggaagaaaagcagctgaatcaggagctgaaaaagctgaacatcaaaaaaacggaggacgtgttgtatgcggaatggaagcccgataaaccgctgtttgtcctgccgtatgaggagaaaaaataaaaagagcattgccctggggcaaatgctctttattatttttcgtgtacgcctgttttaacggctctgacatgatacataccgacatccgtcccaagcatataatcaggtttcggcttgccttggtttgctttgtgggccgcgatgtggtcttcgcttttttcccattgtttccaatggtcttcagactcccagcggattaacacgacgacttcttcatcaccgcggcggacttttttttccaggaccgttacgtctatcaaaccttcctgcttttcaatcacgccttctgaactgaagcgttcgattactttgtcggcatgtccttcttttacggtcatttttctgatttgcacaaacatctggcagctctccaatccttttcacgctttatccaacattttaaatgaaaatgattctcaaagtcaattaaggtgcatgacggattacgatttcaggagaaagacatgaccatcctcatctttaaattgcacgaagctgccccattccatttgtttcggttcatctaaaaaggtgatgccgttctttttcatctgttcgtatgcggcaaagacatcttcacactcaaatacgatagaagccttcatatgctcggcccctttcatcatcgatttcggataaataaccaaatgagtggcagctcctttgggcgcaacctcaagccagaaggcgcccgggcccatcggatgctcggcgacggtttcaaaccccgctttttccgtccagaatgttttcgctttttgctgatcatcagtgtatacggcgactgtcgcgatttttttgatcatcatactgacctcctgtttcatttcttttatagtgtatcctcctgccgaaaaaagcaatcaaaagctttaatgtgcaggctttttttaatttctctagtacgatcggcgattccgatttataatttagacaaaagtacatattcttgaaagaggagacggcagtgaacaaagaccaattacttcatgattatattattacacattcggcagagctgacggaaaaatggctcaagctgagacggaagctgagagggcgtttttattctgcggatcaattaagtgaggaaatgaaacggctgctgatcgagcagcatacctttacaaacacggtcatcgcaagcgcttttttggaagatccggccgtttttcagcataacaaagaaaaatgggccgcacaggtagcgaaaagcagagtggagcaagacgcggaggttcatgaggtcgttgaggcgatcggcaattcaagaaccgtcttttgggaggcggtcacccgttttatggatgagcatcaggacatcgtaacaaacgaggatgcccgccgctggaatcaccttgtcaacggctcgtttgatcagctgatgacggattttactgaacagtttcagaaattaatgatcgcgaggctgtcatctcagcaggagcttatttccgaattgagctgtccggttattttgatcgcggatacgatcggcactctgccgctcatcggatcgattgatacgagacgggcgcgcgtgattttggagtcggtgccggaaaactgtgtcgccaaacggatcacaaatcttgtgattgatctgtccggtgtgcccattgtcgatacgatggtggcgcagcaattgtatatgctgtcgaaaacgttatttctcctcggcatcagaaccgtgttttccggcattcggcctgatgtggcacagacttctatccaattggggcttgatttttcagagtatcaaacttacggctccctggagcaggcgctcgccagcatgggtgtcacatgtgtgatcgaggaagcaaaagcatagaaaaaaggtgctccggccagaggcggggcgcttttttttgtcagcggaaaacaatgtaaatatgtcggaacggaagattgcgttcttaaaaacagctatatgacgccttgggagtcgatttcgggatgacacggtttatatcaaagcgaaggaagtgaaagttttcgcaaagaaaacatatccaaaaattgtgtaaatgttattgatttctgaatgaaaacataatagtataattatatatttcttatcagaatagtatgaattaaaacactcattgtcaaaagacgaacggccagacataaagggggagcatgatgacgtccaaaggaaacgtagatccgcatgtgatcgaaaagattatcagcgcgctggaaacgctcgatttcgggacagttcagattacggttcataattcccaagtgacacaaattgataaggtggagaaatatcgattttccctgaagagcaaagaagtaaaacaatcttaaaaaacagccaatgacaggaggcggtacatatgaagcattcaactgttcctttccgggagagccggtatctacacctgcccgaagtgcgctttctgcattggtgcacgaagcaatacggcattaacaaaggcgtgctcaatacaattgacggctggttttatgatgcgggcgtcattccgattcccgtcaggcgtctttatgtgctggcattcctcgattttgcgaaaacgccggggcagaaggggaatatccgattcgggcacggcggattgacgaaaaaactgcatgatttcatggataggcaggagtgcgcagcaaaacgtcaggcctgacatccttaaaatcttcttaaaatcatgcgaatttctcccattttatttataatagacctatcaagatcatttttttgggaggacttttgacatgcaaactgctgcttatgagagcaaacaatctattatgcagcgcattataacggtatttgtgtttacacttttagttgcgacaatcggcctgtatacgggccagttcattccgccggcattgatgctgccgctgtcggtcttagaggtcgtcatgatcatcgccgcattttggctgcgccgaaaaaaagccgtcggatatgtgtttgtcttttcattcgctttcatttccggaatgacgctgtttccgattatcagccattatgcgtccgcagcgggggcctatgtcgtattggaggcattcggttcatcgtttgtgatttttgcggtgctcggcacgatcggcgttaagacgaaaaaggacttgtcgtttttatggtccttcttgcttgtcgctgtcatcgcgcttctcgcagtggggatctttaatattttcagcccgctgaattccgccgccatgatggcgtattccgtcatcgggacgattgtgttttcaatgtacatcttatacgatctgaaccagatcaagcaccgggacatcacggctgacctgattcctttgatggcattgacgctttatatcgactttattaacctgtttatcaacctgctacggtttttcggaattttaaacagtgatgattaaccgcgcgaaaaaggcgccctgttgagaggggcgcctttttatgttctgccgccggaaaacagcagaagcttatcaaataatacttcaagcatttttgtcaattccgctttttgttcagcggtgaagctttccatgactcctgaaatattggagaagtggccgggaagaaacagcatcagcttttcttttccttcttttgtgagttcgatgctgatttttcgtctgtcgccggtatgccggctgcggtttacaaagccgtcccgtgcgagtccgtcgatcaatccggtgatggtcgctttggtgacattggaatttttcgccagctccgtcggactcaggctgtgtccgggtgcgtcaaacagaaacatcaaaattttgaatttcccttcggacaatccgtgacttgagaaataatgctccatgacctgattcatttttttagacatatcaaataacgtcaaaaatgttttcaatgattcagcatccatatcggcgtaaatctcagcgtgtccggcaatctgcgagtaatccggcaaatgtctcaactccattttgtaagcctccgtaccattttagtgattcaaagtataagcttgccggattcaaaaggcaacctataaagattgacagtttttcagcttatatagtaaggtggctaatagttaatgaatgataaataaatagagaaggcggtatcgtgatgaaccatgaagtgaaaaagatcatcatagcgggcggagggatcggcggcctgtccgcagcgatttctctcggcagagcgggttttgaagtgaccctttgcgaggcggcgtccgacatgcgaaaaagcggagcgggcattctccagccccaaaatgcgctgcgggtgctgcgggaaatcggtgtgtatgatgaatgctgtcaacacggctttcaaacggaatggctgaagcagcatgatgaaaacggaacgctgcagtttaaagtgagtgaggcgtttttagatgattcattgccggggcggaataatatattgcggcaaacgttaaacgatatcctcaaaaaacatgctgaagcggcgggggtcacgattctgcccggtaaaaaagtcgtgtcttacgaagaaacagcagatgaaataacggtgcattgtgcagacggaaccgcgatgacggctgacatcctcgccggctttgacggcattcgctccgctgtccgcgatcaaatgctgcaaagagaagtgaaaacagagtatctcggcatgggagcgcacagattttacatttcttttcccgagccgatatttcatgattcgacactgatgtataaaaaagggcagacgcaggtcggagtcgtgccgctctctgaaaaaacaggatacgtatttatcatccggccgtatgacgctgacttcagggatgacgaggacacgcgttttgaacgggtgaaagacttgctgcgcggaattccgggagtaaagtttgtgacagagaatatgtcaaaggaatatcccgttttgtttcataagattgagcagatggcggtcaaagaaccgtggcacagaggccgcgtcgttctgggcggggatgccgtccatgcaggagcgccgacattggcccagggagcggcgatggcgattgaagacgcgattgtgcttagtgaagaactgcaaaaacacgaaaaccatgaaactgcatgtcaagcatacttcgaaagacgggcggagcgggcattacaggtgcagaatctctcatctgaaatcgtccgccgcgagataaagggaacgcccggcgtccaggacatcatgagggaatgctatcgattgctcaaagagccttattaaataaagaaagtccagaacatggcgtctggacttttgtcagtcttgttcagatttattccgtatccgttcaattacctcatgcagcccctcaggcttgtgaaactccaccggcgaactgcctttttcaaacgagatcgtctccgcctcaatgagcgcgacatagcgcccgttcacttttgcgagatggatggattcgccgaaatcagccagtaatcctttaatctctgtttctccgactttcattttcagctcggcttccggcgtgtgttcaatgatctgcgcggatgcctcgatgacttgatgagtgtcgaggcgctcctgaatttcccgcttttcactcgcttcccaaatttcaatgtcgtgctcaaactgctgaagctcttcgctgttttcttcaaacgtttcatacacgtgttcctgcaccatgttcatgacttggcttttcatgatttccggcatcgattcgccgtattcgacaaatttgagaaaatcttcgaaataacgggcgtgcgaggcctggtggattttcagctcatgctcttccgtcatgccttcttccggcatatacggatattgaatgcttttcatgttttttgtcgtgatggccatttcgacctttttaatgagagacgaggcgtctgagatgcgggcgaccttcggctcgaaatcgcatttcatcataaagacgaatttgtcttcaaaatacttgcgcggaacggccgatgccacgataaaaacaccgccgcgcacagcgctcgtgtcaaggtaagtgcggacgaactgctcgcttgcttcgataaatgcttccttcgtatccgcaagtctggcgcggttgaaaaggttgtaattcggatttgaatcaagctcatggcccggctccgtgataaaatggccgatttttgttgggacttgctcggattgcggatgccgttcggctttccgtttgacgattttcttcaattccccgtcaagaaaatccttcagctcgctttcttcaaattcttccgtgtcaagggtctggaaatgtttgaactgtttgtttgcctgttcatcttttccttccacttgaatgacataaaacgataaaaacttgatttcaaaatccatatgtgaactcaccttatttctgtatttgacaagcctctccagtatagaaaaaaccgttatcgatcgtcaatccgatgattgatccgtgacggcggataatcggccggtgaaaagggcaatgtagttggaaggaacgcatcaatgtgttagaaagggtgttattcatgaaggaaacaggtccgattccgcagccgaagacattcggcccgctcggcaatcttcctttgcttgataaagacaagcctacaatgtcgctgatcaaactggcaaacgagcaggggcctatttttcagctgcataccccggcgggcgccattatcgtcgtgtccggccatgaactggtgaaagaggtttgtgatgaagaacggttcgataaaagcattgaaggagctttggagaaagtccgggcgttttccggtgacgggctgtttacaagctggacgcatgagcctaactggcgaaaggcgcataatattctgatgccgaccttcagccagcgcgcgatgaaagattatcattcgatgatgactgatatcgcggtgcagctgattcaaaaatgggctaggctcaacccggatgaggccgttgatgtgcctgctgatatgacccgcctgacgctcgatacgatcgggctttgcggctttaactatcggtttaacagctattacagggaaacgcctcatccgtttatcaacagcatggtgcgcgcccttgatgaagcgatgcaccaaatgcagcgccttgatgttcaggataagcttatgatcaggacgaagcgccaatttcatcatgacattcaggcgatgttttcgttagtagacagtattatcgcagagcgccggtcaggcggccgggatgaaaaggatctgctggccagaatgctgaatgtggaagacccggaaacgggcgaaaaacttgatgatgaaaatatccggtttcaaatcatcacgtttttaattgccggccatgaaacgacaagcggcctgctttcctttgccatctactttctgctgaaacatccccgtgttttggaaaaagcctatgaagaagccgatcgggttttgaccgatcccgttccttcatataaacaagtgctggatctgacttatatccgaatgattttgcaggagtcattgcgtttatggccgaccgcgcctgcgttcagcctttatgcgaaagaggatacggtgatcggcgggaaatatccgatcacgccgaaagacagaatttccgtcttaattccccagcttcaccgtgataaagacgcgtggggagacaatgcggaggaattttatccggagcggtttgaacatcctgatcaagtgcctcaccatgcgtataagccgttcggaaacggtcagagggcgtgtatcggtatgcagttcgccctgcatgaagcaactcttgttctggggatgattctgcagcattttacctttatcgatcacaccgattatgagctcgatattaaacagacactgacgatcaagcccggcgactttcatatccgggtgcggccgagaaacaaaggagccgttgcggcagctctcccggcggctgaaaaaacggcgggagacgtcgaaaaagaaaaacgggaaacaaaaggcgcatccattatcgggcttgataaccgaccgcttctgattctgtacggctcagatacgggaaccgcagaaggcgtggcgcgggagcttgccgatactgccgggatgcacggcgtccggactgaaacggcgcctttgaatgaccggatcggaaaactgccgaaagaaggagctctcttgatcattacgtcctcttataacggaaagcctccgagcaacgcgggacaattcgttcaatggcttgaagaagtcaaacccggggaattggaaggcgtccgatatgccgtcttcggctgcggtgatcataactgggcggcgacatatcaggctgtgccgagactgattgatgagaagcttgccgaaaaaggggcggaacgcttttcctcccgaggtgaaggggacgtcagcggcgattttgaaggaaagcttgatgaatggaaaaaaagcatgtggacggacgccatgaaggcattcggtctcaagctgaatgaaaatgccgaaaaagagcggagtgcgctgggccttcaatttgtcagcgggcttggcgggtctcctttggcacagacgtatgaagcggtttacgcatccgttgcggaaaacagggaacttcaggcgccggaaagcggccggagcacaaggcatatcgaaatcactctgccgaaagaggctgcctatcatgaaggggatcatctcggcgtgctgccggtaaacagcaaagagcaggtcagccgtgttctccgccggttcaatctgaacgggaatgatcaagtgctgctgacagccagcggacagagcgcggctcatctcccgctcgatcggccggtcaggctgcatgatcttctgagcagctgtgtcgaattgcaggaagcggcatcaagggctcaaatccgggaaatggccgcttatacggtctgcccgccgcacaaacgggaattggaagattttcttgaggagggcgtctatcaggagcaaatcttaacatcgcgcgtctcgatgctcgatctccttgaaaaatatgaagcgtgtgaacttccgtttgagcgatttctggagcttttgcgcccgttgaagccgcggtattattcgatttcaagttcgccccggaaacatcccgggcaggcttcaattaccgtcggcgtcgttcgcggccccgcccggagcggtttgggtgagtatcgcggagtcgcttcgaattatttagcggaccgcggccctgaggatggtatcgtgatgtttgtccgcactccggaaacacgattccggctgccggaagatccggaaaaaccgattattatggtcggtcccggcacaggagtcgccccgttccgcgggtttctgcaggcccgggcggcgttaaaaaaagaaggaaaagagctgggggaggctcatctgtatttcggatgcagaaacgatcatgattttatttaccgtgacgagcttgaagcttatgaaaaagacggaatcgtgacgcttcatacggctttctcccgcaaagaaggcgtaccgaaaacgtatgtgcagcacttaatggcgaaagacgccggcgctttaatttccatcctcggccggggagggcacctctacgtatgcggcgacggcagcaaaatggcgcccgatgtagaggcaacgctgcaaaaagcgtatcagtcggtccacgaaacagacgaacggcaagcgcaagaatggcttttggacctccagacaaaaggcatttacgcaaaagatgtttgggcggggatttgaccgatttgatgtaaaggactggatgactccagtcctttttccttcaagaaaatgaattgctttccaatcgatatacattcggtttgtcagcaatctgaaggctttgttgggagatcttataacaagataaggatggctcacagtggtggaacgatatcagcgccaagagtcccatctgctgtttccaagactaaatagttgcgcctattttggataaaacctctttacaaatatatggaattagaatatactctgtttcacaaagtactttgtaaaaagaggagcctgttttatgtcaaatcagaattttcgtgaatcagagatagctgaaaacttatctcatatcaaagtcttaacgaactacaagactgagtactcaaggcaaaccagtccatatttcattatttggggctgtatatggattattgcgtactccgtttctttatgtaaggtaccttctgtagtccttgcttgtgtctggttaatactggcagtattagggtggatactgactttgaagacatatcttaagcagaaacaatttgatcccatgcccactttcttaaagaatcaattaaaatatgcatggattggattcatattaatggtatgcatttttgttttcctgattttaatgggattattgccgcgaacaggagaatttctatcgtttttgattgtgttaatggtgtctattatgtacatattcttaggcatcgtgttaacaaaagagatttttgttatgggattttggctgagcatactcggtatgcttacattctgcttacttcctaatgcaatgaatattgtttttgcatttattggcggaggcagcctattacttacaggaatgattttgaaaagaaaagggcaaggaaatgagtaatgttaacaatatcaatgatttaatacatgccaaagtacggttgggaattatgagtttactgatgacttatgatcaatgtgattttactttcctgaaaaagtcattagacatcacagatgggaatttaggttcgcatctgaaaaagttagaagatgcagcttatatagaactaaccaagaagttcgtatccaaaaagccgaagactattgttcagattacgaaagaagggaaagcagcctacaaggagtacattaatacaattgaatccatatttaaaataaataacagtgggggaatggtgtaaatgctgcaagttgaacatataagtaagcgctatggcacgactctggctttggacaatgtggctttaacaattccgaaaggagtctgctatggacttgttggaccgaacggatccggcaaatctaccttaattaagatcatctcacgcatcatccgggaatatgacggtaaggttgaatttgtcggtaatgaaaatggcagattgggttatgttccacaggatatcagccttgaagaaaaattaaccgcaaagaccaatatggaatttttcggaaaggtacatggactgaatggcttaaaactaaagcaaacaacaaaaaaactgttagaagatatcgggttgtcagaaaggacaaacgacgttgtggagaacttttccggaggaatgaagcgccgtttaaatatcgggtgtgcattaatgcacgatccagacttaattattctagatgagccgacggtaggcgtggatccgcaatcacgccgctacatttttaacatcgtaaatcgactcaaaaaagccggtaaaaccattatttatgtgagccattacatggaagagattgaaactctttgtgactatgtagcttttatcgacagagggcagattatcgatgaaggagaaataaatgaactgcttaaacgacatgaagaatcatctattatgtttaactcctcattgtctcatgaattaataaagagccatggttttgagttttcagtcgttaattcagggctgataataaaaaccaaaaaacctttagaaaccatggagcgcttaattagcgtcagtaaggaaaacaatattgtgcctcatcagttgtttttatataagccaaaattagaagatgtattctttaaacttaccggcactgatttgcgtgatgaagaataaagggggaatttatcatgttaccgctcgctcaaattgaaacgctaaaacagttaaaggataagtctctgtttttttggacgattatattacctattgtgtccatcatattgctgattgagctatttacgacagacagtacaaacaaaactttagtagcttcacaatccgtaaccggtatgagcgtattcttttctacattcattattatctccatcgttataagttttgtaaaggatcgggaaaaaggaattgtatcaagactggcaagtacccctttaaagccttataacttcttcttaggaaaaagtatcccttttttagtcataacttttatgcaaatgcttctcctttctgttttaggaatatttctgtatgatattgaaattaataattttccggcgtatctgtgggttgttgtgttgatatctttactggttacatcctggggagttgccatttcagtctttgcaaagactgaaaataccggtttggtcatgacaaatgtgattgcattaggtaccgctgttgtatgtggtttatggaccccttatgatcaattaccaagctatcttcaaactattggaatgctctttccgcagtactgggcgcatcaagggttaattcaatcggtctcgacgatatcgggaggagaaagtctaatatgggtaacccttgttgtactgagctatacaatactgggatttatagtttctctaattggataccggcattacattaaaatggcaagaaactagaccgctgaagaatgggtcattaaaacgcagctgggactaaaaggagagcgggaaatgataagtgaaaaactaaaactgtatgtcgagggtctatttaaaaagtacgaaagaaattcgttactgagtagaaaaaaacggagctaattcctttattggcgggtttgatgaaaccaattcacaatttttttcgctaatgagaaacagaaatttgcaagacgcgttaaggaccagtgttggagaacagttaaagcagtcacaaatgccagctctgctgcatggttggattataaaaaacaaaaggtaaacgtgaagaaagcatttttgtatatctttagggtctaagcgataatttgacaggtaaaggactggatgactccagtcctttttttacatcagccaaaaaaaccttcaagttttttaacccctttgcatacaataacttcagcccgcctgttgggcggctgtctttgatattcatttttcgtttttagaagtttgtgttattcttatatttggtatctcctattttcagaccgggtctgatacggtaccttttaatgccagaaaaaaatgtgaaacgaagaacggatatcctgcgtctaatggctggcgggataagatgttcaatgggcatgacacgaatgataaatatatcgtttttttaaatggtgtgtttatggggctgtgtgatgctttcgttttgctcggaaagcaggaattgaagcaaaaagtaagaatacagatttaaagtgtttaggaaagtagaggttgccatgaagaaattattttcttacagacttagtttttttgtactggctattattttgttttgggccaaaacgtatttagcctatcatgctgaattcaaccttggggtgaagggtccgacgcagcagtttctgcttgtgatcaatccgttctcaagcgccattttctttttaggactggcattgtttgcgaaaggccgcaaatcagcgattatcatggtgattattgatttcatcatgacgtttattttgtatgcaaatatcctattctatcgattcttcgatgatttcttgacattcccgaacttaaagcaatccggtaatgtgggaaatatgggagacggcatcttcagcattatgtccggccatgatattttatactttgttgatattattattttaatcgcgcttctggtgtggagacgtgagctgaaggaattcaagctgaaaaaacggtatacgtcattaattatcgtgacgggtattgttttgttcttcgtgaacctggcgattgccgaagaggaccgcccggagctgctgacaagaacgtttgaccgcaattacattgtaaaatacttaggcctttataattacacaatttatgacggcgtacagacggcgcagacggaatcacagcgggcatatgccagcagcgatgacctgacgagcgttgaaaactacacatcgtcgcattatgcgaagccgaacgccgagtatttcggcaaggccaaaggcaaaaacatcattaagattcacctggagagcttccaatcgtttttgatcaactacaaacttgacggaaaagaagtcacgccgttcctgaataaactcgcccgcggcggagaggacatgacgtactttgataactttttccaccaaacgggccaaggtaaaacatctgacgccgagctgatgatggataacagcctgttcggactgcctgaaggatcagccttcgtgacaaaaggggaaaacacgtatcaatcgcttcctgccatccttgaccaaagtgagggctatacaagcgccgttttacacggtgactacaaatcattctggaaccgtgaccagatttacaaacatatcggctacgataaattctttgacgccagcacatacgatatgtctgatgacaaccttgtcaatatgggactgaaggataaaccattcttcaaagaatccattccgaagcttcaatcgctgaaacagccgttctacgcgcatttgctcacgctgacgaaccattatccgtttacgcttgatgaaaaagacgcaacgatcgaaaaagcgaaaacgggcgacgcgactgtggatgactatttccagacggcgcgttatctcgacgaggcgcttgaacagttctttaaagacctgaagtcatccggtttatatgacaactcggtgattatgctttacggagaccattacggaatctctgaaaaccataaccgcgcgatgaaagaaattctcggcaaagaaattacgccttatcaaaacgcgcagaatcagcgtgtgccgcttatgcttcgcatccccggcaaaaaaggcggggtgaaccatacgtacggcggtgaaatggacgttgtgccgacgatccttcacttggaaggcatcgattctaagaaatatattaatttcggcaccgatctcttctcgaaagaccatgatgatacggtgacgttccgtaacggagattacgtcacgccgaaatatacttccatctccaatgtcgtatacgatacgaagacaggaaaagaactgaaaggcaatcaggaaacgaaaaacctgaaagccagagtcacagagcagctgaagctgtctgacagcgtgatgtacaaagacttgctcagattccacaaattgagcgactttacgccggttgatccgtctaaatatcattacggcaaagaaaagctgaatcaggataataaataatagaaagagccttacggaatttccgtgaggctctttttttgtgtgtatcttcaccaatctgaaaaaagagagagcttttggtcacaaagggcgccaatctctcatatcttacagtagattttgaaaccggtgatagagaatcggacaaattatcgggttggtttctcttatacgggcggtttcgaatccaatattcacagagaagaggggtagagatgaaagcagtcattctctgcggcggaaaaggaacgagaatgagcgaaatcaccaatgaacgtcccaaaccgctcgccatgataggcggcaaaccgattctatggcatattatgaaactctatcaatactatggcgtgaacgaatttatcctgcttcttggtttcaaaggagagatgattaaggaatatttcttagattatgactggaagaatcacagcatgacgctggacagctctaccggagaagtgcggatattgggaaaatccgagccgtggaaaatcacttttttagacacgggggaacacacgcagacagcggggcggcttttacaggcgaaggacatcatcggtgatgaaacctttcttatgacgtacggggacggactggcgaacatcaacctgtttcatctgatcagctatcatcaatcaaaaggggctgcggcgaccgtcaccggtatagaaaagacctcgcaattcggaacgctgacggttgaagacggtatggcgaaaagcttttctgaaaaaacctcaagtgacggcatcatcaacggcggatttttcgtgctcagcccgaaggtatttgattatctgccgaaagacagggatgtcatgtttgaagaagaaccgctgaaggagctggcgaaagacggcgaattggcggtataccggcattacggtttctggacggcgatcgatacgtataaaaacctgctggaaatcaacaagatgtgggaccggggacaacatgtatggaaggtatggtgatcaagtttgagtttctggaaaaataaaaatgtgtttgtgacgggatgtacaggtcttttaggaagctgcttggtgaaggaactgatcgatcagggggccaatgtgacgggacttgtccgtgacactgtgcccaagtcgaacctgtatcagggagaacaagtgaagcaaatgaatatcgtgcagggcgcgcttgaagatctggatgtgattgagcgggcgctgggcgaatatgaaattgacacggtctttcatttagccgctcaggcgatcgtcggcgtcgcaaaccgcaatccgatttccacatttgaagccaatattctcggcacatggaacatccttgaagcgtgccgcaggcatccgctcatcaagcgggtgatcgtcgcgtccagtgataaagcgtacggcgaccagccgacactgccgtacgatgaaaacatgcctcttcaaggcaaacatccttatgacgtatcaaaaagctgtgccgatttattaagccacacatattttaatacgtacggacttccggtctgtattacgcgctgcggcaacttgtacggcggcggagatttgaacttcaaccggattattccgcagacgattcagctcgtgctgaacggtgaagcgccggaaatccgcagcgacggcacatttatccgtgattatttttacatcgaggatgcggtcgaggcataccttttgctggcggaaaagatggaggagctcaatcttgcgggagaagcgttcaacttcagcaatgagattcagctgacggtgctggagcttgtagaaaaaattcttaaggccatggacagtgacctcaagccgaaagtgctcaaccagggaagccatgaaatcaagcaccaatatttatcggcggaaaaggcgaggaagcttctgaattggacacccgcgcataccattgatgaaggattggaaaaaacgatcgaatggtataaagccttttttcaaaagtaacagaaacagaggtgagagaaagacgtgacaagcgcatattgcacagttttatcaaaaggaaggctgtatcaggctatcgctttgttcggctcattgaaagcggttcaggcggacgcccccatttttactttgtgtatggatcaagacacctatgacgtgcttcaggcaatgcggcaggataatgtcaccttgattcaggtgtccgcactggaaaatgaggagctccttgaactgaagcggacgagggatcagagcgaatactgctggacggtgaagccggtatttctcgaattcgtgctggacggacatccggaattagagcgtgtcacgtacattgatgccgatttgtttttcttcgctgatccgcgcgcgatttttgacaatcagccggattgttcggtgcttctgtcacggggcgatatcgtcattccctcatttgaaaaacaggaaatcgacatgctgcagcgtcttttaggccggtataattccggttttctcagcttcaaaaccgacagtgccggcacagattgtctcagatggtggaaagaacgctgcctggaagaatgcaaaaatgcgccgggcgaaggaaaattcggagatcaaggctacttggattacatgtccggcctgttcccgaatgtgtgtgacatcaccacgcccggcgtgaatatcggccattggaattacggccgccacacgttttcatggaaggacgggcgtcttgtgctcgaagacggaagtccgctgattttctatcatttcagcggataccggatcgttacagccggcgacattcggcagattcatgagacggaccggaccgacctgccgtttgtccatcagctttatcaggacattctgaagcgggtgatcgggacggtcagcgccgtctgcccggagttcagcggctttgcatctgaggatgataacaaataaatgatcatatacaggaagtgaacgaaaagtgaaggcaagcgtcattgttcccgcatataattccaaggagcggctctataacagcctgctgtccctgaatgaacaggaatgcacagagccgttcgaagtgattgtggctgacaacggttcggaagacggaaccttatccatgcttgaatcattcagcgcgaattttccgctgatttttgtgagaattaaagaaaacagagggatcgcttacggccggaatcaggcggtccgcaatgccagaggcgatattttgatcttccatgacagcgatatgcttgccgaaaaggatttggtggcgaagcatatcaaggctcatgagaaccgggacgatcttgtcgtatgcggtatgttctggaagcggatttacagcttttattatgaccgttttgaaaaagagcataaagagaaactcgccgaactgtatgaagagctgccgggcgataaagagccgctccttcatgaaagtgatatcagagacggaagttttcttgaccaatgctttgatttagataccgactttatccgtgtgctgaaaagcattttggaaaaatacggagatgatttgaacggctaccgtctgccgtggcgttttttcattacgaacaattcgtcagtcaagcgacagcacgtggcagatctcggcctgtttgatgaaggcattgtcagatacggctttgaagattatgatctcggcatcaggcttcatcagtcgggaatgagatttcagctgcggcgcgatatcatgagcgtccatcaggagcatccgagcaactgcgcttccgttgatgacatcagggcgaatatcgcgtacatgtgcgacaagtataatgacattcattcgcttgacgtgcacctcgcgtttaacggcccgtttgacgcggagttaaccaacagcatgatggcagacatcgaagtgctgcttaattatgagaaatatgaaagcctgctgcacatttttctcgagctgctgcacgcggttaaagaccgcaaccttgacccggactggaagacgaaaagcccgcggatcacggcgaacagcttcaatctgccggaggtcggaaagcttttggcaaaagcggaaaaaaagctgggcgtcacgcactttgcaagggcgttcaaagcgctggctgctgatttactgcatgtggatcttaaataaattggatgtgatatggtgagtaaatatcatttttcaaccattgtttccagaacgcatatctttaaactgatgccgatgattcattctctccatgagcattgccgggattttcatctgtatgtgctgtgtgtcgatccgaaagcgtacgaactgcttcagcaggtgccgtgggaacatatcacggcggttcagctccatgaaatggaggacccggagctgcttgaagcaaagggcggccggacgtttcatgagtattgctggacgctgaaaccggcatttctgttccatgtgatgacggagtatgatgaagctgaatattttgcccacttggacaccgatctctttttcttctcagatgcgggcgagctgtttgcggaaaagccggatgcttccctttttctgacggaccaccgcaattcagaacggtttgcgtcttattacaagctgacagggcagtacaacaccgggtttgtcggcgcgcggaataccggggaagcgtatcgggcggtctggcagtggaggcaggattgcatctcttattgtacggtggagatgaatgaagaaaaaaagacatacggtgatcaaaggtatgttgaaaagtggcccgcgcagtttgaagacgttcatgtcacggagtcgatcggcgcgaatgcggcgctgtggaatattgagcaatatgacgtcagcctgcgcggcggggctgtatatgtcaatgacaccccgctgattttttatcatttttcaggctttacgctcgtcacggagaacgaattcaatctgtgctggtactatcacattgatgacgaggcgacagtcaatatgatttacgtgccgtacatcaaaaacgtaaaaaaatggattgatgaaattcaaaaagcgtttcctgatttcagagacgggtttattccgaaatatgcggttcctgatactcatttttatacggttgaaacataaaatccctgccgaaaaggcagggattatttttatgaatgccattcttttaatgttttgtcgctcggcaggacaaaggcgagcagacctaaaacgggcagaaaggcgacggcagtcatggtcggcgtcaatcccgctgaatcaataagagctccgagcgcaacggctccgatcgcgcccattccgaaggcgagcccgaccgtaagccctgacatcgttccgattttgcctggaacaagctcctgcgcgtagacaaccgtcacggagaagctggacatcagaacaacaccgatcagcgccagtacgccataggcgatgacaggccccgcaaacggaaggaaaatcgtcaatggagccgatgctatcatcgaaacaatgatgacgttccgctttccgaaacggtctgcaagcggcccgccgagaaacgttccgacagctccgaaaaataaaaagacgaagatgtagctctgtgcctgctgaatgctgacatgataggcattcatcgcatagaacgtataaaagttgccgatcgcgctcacataccaggagcgcgcgaaaattaagaagataatcatgataagggcgagaataatcggttttgtaatcacggtctgcacagcggaggccggtgattttttacttacggcgcgcaaatgaataaggcggcctttataccatttggcgatatagatgagaaacagcacagcgattgcggcgactagcgtaaaccagacagagccgaattgaccaagcggaacgagaatcagcgcggtaatcaagggcgccatcgcctggccggtattccctccgacttggtaaatcgattgcgccaacccgcgcttttcgccggcggccatgtaggcgacacgcgatccttcaggatgaaagacggcggagccaaggccgataaaaaagacacagcataaaatcgtcagaaaagacggggcgaacgcgagacctaaaatgccgagcatgcttgcggtgagtccgagcggcaaagcatacggcatcgggcgtttatccgtataccagccgatgacgggctgcatcacggaagacaccatattcagcgtaaaggcgataattccgagctgcgtaaatgtaagattcatggaacgttccaatatcggaaacatcgccggaatcaccgcttgcagtgaatcgttcagcaaatgacagatcccgataatgaacaaaatagaatacatggttgtctcgggacgatggacaggtttttctttaagcggggcggcaattgccaaagtgattctcctcctttttatgtaaacgaagcatacaccatattattcataaggtgaatgaattatcaagtgcaaaaaaggctcttctttctcaaacagaaaaaagagccttccttttttatttatttaacaaactgtgttttctcgaatacatcatataaacgacgatcccggcggcgatccagatgacaaaggcgagccatgtcacacccggcaggctgcttgcgagatacaggcataagcatgcgctgatgatcggcacaaaaggcacgaaaggaacacggaaggaagatttgatctccggatgtttctttcttaaaacgatgacggcgatcgcaatgaccgtaaaggccgccaaggttcccatgttgacgagatgcgccaaggttcccaaatcaataaaacccgcgatcccggcggcaacgatccccgtcacccatgtgttttgaaacggtgttttaaaacgcgggtgaaccttggaaaacatgcggggcaaaaggccgtctctgctcatcgcaaatgtaaggcgcacctgagcgtaaagcagagcgagcatgaccgttgtaatcccgataatcgcgccgacggaaataatgcctgctatcttgttctggccgacaaattggagcgcgaaagataccggatctccgacattcagcttagtatacgaaagcattcccgtcaggacgagcgataccgtaatgtaaaggatggtgcagatggcaagcgcaccgatgattccgaacggcattgatttctgcgggtttttcacttcttccgacgcgtttgacacggcatcaaatccgagatacgcgaagaaaacggtcgcggcgctcgtgatgacgcctttcattccgaacggcataaacggcgaccagttttccggtttcacgtagccgaaaccgacgatgataaacagcagaatgatcgcaattttcatcaatacaatgacattgttaaagcgggtgctttctttcacgccccttgaaacaatcgcggtaatgaccaaaataatgataacggccggcaggttgaacacggcacccgttttgctgccgggtgcggcggtcagcgcctccggaagatgcagcccgaagcccgcaagaagcgactggaaataggaagaccagccggttgcgacggcggcgagcgcgatgacatattcaagcattaagtcccatccgattaaaaacgcgagacactccccgagagtgacatatgaatacgtatatacgctgcctgaaatcggaatggatgaagaaaattccgcataacaaaacgcggcgagcgcgcaggcaaggcccgcgagcacaaacgacagaatcaaagccggtcctgcgcctgtcgcggccacagtcccggtaatcacaaaaatccccgtgccgacaacacagccgattccgagcaaaaccaagtcaaaagcgcttaacgagcgggacaggctggtctgtttgctctgagcctttaagtcggccagcggctttttccgaaatagtaaagacatatgggtcctcctgaaaattcataatattcttatcattatatacactgacgtttgtattatattgtcgaaatttctcgcagtcaattaaagaattttccactttaaaaggacaaagctaaaaagcgtcgatgcacggaaggaacgggaattttattgtgaaatagttcaattttctcaccttaagaccgatacaaaagatgactcatcaactaatttcaagtttcggtgaaagggagatgttttacatgtttcaatatgaagaactaaataagcagtttatcggcggccgatggagggatggaagcagccggaacgtattggaaaacagaaatccttatactcaaaaagtcatcacctcattccaaaaagcgacgtctgatgacgtggatgcggcatatcgcgccgcggctcttgcgaaacaagaatgggacaaagtaaacccttttaaaaagcgggccattttggaaaaagccgtttctttcattgaagagcacgaagaagcgattatttacttaatcatggaggagcttggcggaacacggctgaaggctgagtttgaaatcggacttgtcaaaaatatgataaaagaagccgcaacatttccggtgcggatggaagggaaaattctcccgtccacgattgacggaaaagaaaacaggctgtacagaatacccgccggagtcgtgggggtgatcagcccgtttaatttcccgtttttcctttcgatgaaatctgttgcgccggcactgggcgcggggaacggcgtcgtgctgaagcctcatgaagaaacaccgatctgcggcggaacgcttatcgcgaaaatttttgaagcggccggcgtaccggacgggctgctgaatgttatcgtgacggatatcggggagatcggcgacagctttgttgagcatcccgtgccgcggataatctcatttacaggctcaaccggagtgggcagctatatcggacagcttgcggtcaaacactttaaaaaaccgctgttggagcttggcggaaacagcgcgctgatcgtgcttgaggatgctgatcttgaatacgccgtcaatgcggctgtattcagccggtttacgcatcaaggccagatctgtatgtcggcgaaccgcgtgctcgttcacacatctgtatatgacaaatttacagagctttacgaagcgaaagtgtcatcgctgaaagtcggcgatccgatggaccctgatacggttatcggccctttaatcaatgagagacaggcggaaggtttgagacggtctgtcgaaaaagcgatagaagagggagcggttccggtgctgtccggccgattcagcggaacggtcgctgagcccgtcattttaaaagatgtgaaacctgagatgagcattgcgaaggaggagctgttcggaccggccgtctgcatcatgccgtttgaaacggaggaggaagcggtaagcatcgcaaacgcgacaccgttcggtttaagcggagccgtgcatacggcaaacgttgagcgcggcgttgagtttgctaagcggatcgaaaccggcatgattcacgtcaacgatacgaccattaatgatgaaccgaacgtcgcgttcggcggcgagaaacaatcaggtctcggcaggctgaacggcgaatggagccttgaagaattcaccacgctgaaatggatttcggttcagcatgaaaaacggcaattcccatattaagaaggagtgaaagaaatgagtatacagacggagcagcaaacgcacagcctgcttgacgcttttgtcaaagttgcgccttttttaaacagcctgatccaagatgacatcaccatcggaatttatgatacagaaaaattaatcgtgaatattccggctaaaacgttttctcttaatgtaaagccgggagacccgctgcaaaaaggggacatcattacagacgcgatccgcatgaatcagaagaagacaagcatggtgccgaaagagctgttcggatttccgctgatcgccagagcgattccgcttcacgatgaaaacggaaaagtcatcggcggcgtcggtctcggcaccagccttgaaaaatcagccaagcttcacgatgtcgctgaaagcctgtccgccgtcgtggaacagaccgcttcggccatcgcggatatctcagaatccatcagcggtttctcagcacagatgaccgggatttccactcaggcgaaacaagtcagtgaaagcgcgggagaaatcgccgacatttccgtcactgtcaagggcatctcggatcaaagcaatctgctcggtttgaatgcggccattgaagccgcgagagcaggagaatccggcaagggcttttccgtggtggcggatgagatccgcaagcttgccactcattcaaaagacaacgtcggccaaattgaccagattacgaaaaaaatccacagcctgctgaaagggctggaggactctattgaatccatcaaccagaacacaaacggccaagcggcggcggttgaacaaatttctgccacgatgcaggaaatttcgggaagcgcccagcatttagcgaaaatggctgaaaacgtactcggagagtcataaaaaaagggagcttacgggctccttttttgttttccctttaccaatcggaaactgcacttacacgtttgatccgtcatgctcaggggtacacatacgaatacatcaccaatgataaaggagagtcttgtatgtctgatgcaaatctgcacaacccgctgacgaaatatgatcatgatgaatttccaaaacaatatcaagaaccgcccggtttgcagaaagagatgaagcctgtgccggactgcggtgaaacgagctataaaggagccggcaagctgaagggaagaaaagccctcgtcaccggcggcgattcaggtatcggccgggccgccgcgattgcttatgcccgggaaggggcggatgtggcgattaactatctgcctgaggaacagccggatgctgaagaagtgaaagcgttaattgaaaaagagggaagaaaagccgttctgctgccgggagatttaagcgatgaagcgttttgcggagaattggcggaaaaagcgtatcaagagcttggcggtcttgacacgctcgctcttgtcgccggcaaacagcaggcagtggatgatatcagcgatcttgccacagaacaaatctatcaaacatttgaagtcaacgtattctcgctgtattggctcgtcaaagccgcgcttccttatctgccggaaggcgcgtctattatcacgacaacgtccgtagaagggtataatccaagcccgatgctgttggattatgccgcgacgaaacatgccattatcggttttaccgtcggcttaggaaaacagctggcgaataaaggaatcagagtcaactcggtagcgccggggccgatctggacgcctctgcagatttcgggaggacagcccggtgaaaacattccgaaattcggcaaggaaacaccggccgttccattaaagcgtgccggacagccggcggagctagcaggaatttatgtctttttggcctcagaagaatcgagctatgtgacatcccaaatttacagtgtaagcggaggaattccgacagcgtaatcaataaggagctgcccttcatacgggggcagctcttttttttgatgttatgtgccgagcacgttttgattatacaggacactcggatgtgacggatgataggaggcggctttgtcgttatgaatcttcgctttttctctgtcgccgagctgccagtggcagacgcagagctgcagatggggataccaggtggaatattcgagctgggtaaagcctgcatcactgcttttggcggatagggcgagctcataccaaaacacgccctgccggtattgccgtttctccgcaaaatagtcgccgagcctgcagcagaactccggccgcggacaatcgatcagaaatgattttaagagagacgtcatggcggcctcttcatggccgaccgccctgtagcaatcggatagatattggcatgttctgatctcgtcttcgatccagcactgttttgtggaaagaaaatggtgataatacgtgatggcgcgctgatactggccgtgatcctttaattcattcgcgaagtaaaacaaatcgcgcggtgtcatcgtttcactgttttccgccattttctcataaatcttcaagttgcggtctgagggaggcgagtgctttttcgcggatttccggtgtgtgacggcaatatcggtttctatgatgtttccgtatacttcaagatactcatgcacggctccgatccagcggaatcctttttcacgcttaacgagacggttgcggcggtatctgaagctgacctctccccgagcatcaaagccgacgtgataatacatggataccgcgtccacctcttttgaaagcgacgccttcagttcaatcagcttttcacggtccttttccgtcaatatatcgtcggcgtccagccacagaatataatccatttccgctttcgaaaacacaaagttacgagcggccgcaaagtgatcgatccattcaaaatcataaatcttatccgtataacgggccgcgatttctttcgtccggtcggtcgagcccgtatcagcaatcacaatttcatccgcaatgtctttgacggaatcaagacagcccgcaagcacttcctcttcatttttcacgataacgcacaaactgacgctgatcatgtcatcacctcttcacctccagtgtataaaaggagaggcggaaacattcttcggacaaaatgatctcttccaagaaatttgtctgtccttttactagttttattccagcgcctgatttaaaatgaacacatgaacttacgtgaggattgatagggaccatgagcatcataaaagcggaaaacctttataaaacatacggagataagacattattcgaccatatctcctttcatattgaagagaatgaaagaatcggtttaatcggcccgaacggaacggggaagtctacgcttctgaaaaccattgccggccttgaatcaacggaggaaggcgagattacggcttcaggaaacgtgcatattgagtttttgcatcaggaccctgatcttccggccggacaaaccgttcttgagcatatttattccggcggatcagccgtcatgagaacgatgagagaatacgaaaaagcgcttcaggcgctgaatgaagaaccggaaaatgaccagcgccagaaacagctgcttgatgcgcaggcccgaatggacgcgaatgatgcgtgggaggcgaatacgttagccaaaacggttttaaccaaacttggcgtcaccgatctgatgaaggatgtcagcgagctgtccggcggccagagaaagcgcgtcgcgattgcgaaaaacgtcatccagccggccgacctgctgattttggatgaaccgacaaaccacttggacaatgaaacgattgaatggctggaaggctacttatcgcaatatccgggcgccgttatgcttgtcacgcacgacagatattttctgaacagggtgacgaacagaatttacgagcttgagagaggcagcctttatacgtataaaggaaactatgaagtattcctggaaaaacgggccgaacgggaagcgctggcggagcagaaagaaacaaaacgtcaaaacctcctgcgccgcgaattggcgtggctcagaagaggggcgaaagcgcgctcgacgaaacaaaaagcgagagtggacagagcggaggcgctcaaagagcaaaaagggccggcagtctccggatcactcgatttcgcgatcggctcccaccgtctcggaaaacaggtgatcgaagccgataacgtcaccattacctataacggccaagcgctgatcagccagtttaatgagcttgtcatcccgggggaacgaatcggcatcatcgggccgaacggaatcgggaaaacgacacttttaaacagcctcgccggcagaattcagcctgacagcggcaatatcaccatcgggcagacggtccggatcggctactacacccaggaccacagcgaaatgaacggtgatatgaaagtcattgaatatataaaagagacggctgaaatcgtcaaaacggcggaaggcgatgtcatcaccgcggaacaaatgcttgagcgttttctgttcccgcgtccgatgcagcagacatatatcagaaagctgtcgggcggggaaaagcgccgtctgtacttgctgaatgtactgatgcaggaaccgaatgtgctgtttttagatgagccgaccaatgatctggacacggaaacattaagcgtgctcgaagattatatcgaacagttcccaggcgtcgtcatcaccgtatcccatgaccgctattttcttgaccgcgtcattgaccgcctgatcgtatttgaaggacaaggtgtcatttcccgtttccaaggttcgtacagtgaatacatggaacacgcaaaagcgaagaagacggcggtaaaacagccggccgaagagaaagaggcggaggaagagccgaagaaaaagcgcaaaaagctttcatataaggatcagatcgaatgggacggcatcgaagacaaaatcgccggccttgaaggaaagcatcagcgtctggaagcggaaatcgctgaagcgggaagtgatttcggaaagattcaagaactgatggccgaacaggcaaaaacggctgaagagcttgaagcggcgatggagcgctggaccgaattgtcactgatgattgaagaacttgagaattaagaaaagccggtacggcccccgagaaagatggcgggtcataccggctttttttatcttacacagatgtctcccggcgctttaaagacaaacgttttgtccaagcaaagtttatcaggcataaaaagttaacgtttacgttaaggttcaaatggtgtataatagaaacagatacgacaagagggggattcaccttggaatggatgaagattgatcaagttgccaagcgaagcggattgacaaaacgaaccattcgtttttacgaggagattggtttgattcctgctcctaaacggacagaaggcggcgtccggctatactctgaagatgatatggaggagctcgaaaaagtcaccagcacaaaagaagtgctcggtttttcccttcaggagcttcagcagtttatggagatgagccgtcagctggaattaaacaaagaggggtacttgttgtcactggatccgaaggaacggaaagaaaagctggaagagattcagcaggctttgaaccaccagcttgagatgattgatgagaagatcagcacatttcagcattttaaaacgcgccttaacggaatgaaagaaaaagctgaccgcgccattcaatcaatcgaatgattttgctgtaaacgctatggatatagcgtttcttttaatggatgaaacaggaggtctggtcaaatggatacatcatcacaacagaaaacaggcttattcagccagccgaaagccgtttgggcggttgcgtttgcctgtgttatttcctttatgggaatcggtcttgtcgatccgattcttccggcgatcgccgcacaattacatgcttcacctagtgaagtatctctgttatttacaagttatttgctcgttaccggttttatgatgtttttctccggcgcgatttcaagccggatcggcgcaaaatggacgctgcttctcggacttatttttatcatcgtgtttgccgccctcggcggaagctcaagttcaatcgctcagcttgtcggctatcgcggcggctgggggcttgggaatgctctctttatttcaaccgcgcttgccgtcattgtcggggtatctgtcggcggcagcgccaaagccattattctgtatgaggctgcactcggcttggggatttccgtcgggccgcttgcaggcggagagcttggcagcatctcatggcgcgctccgttcttcggagtgtctgtcctcatgttcatagcgctttgcgcgatttcactcatgctgccgaagctgccgaaaccggcgaaacgcgtcggtgtgtttgatgcgatgaaggcgctcaaatataaaggccttttgacaatggcagtatctgcattcttatacaactttggattttttattttgcttgcttattctccgttcgtgctggatttagatgaacacggccttggatacgtcttcttcggctggggtttattgctggcaattacgtcagtctttacggcgccgctcgtgcacaaagcgctgggaacagtgggttcgctcgtcgttctctttatcgcctttgcggtcattctcatcgtcatggggatctggactgaccatcagacgttgatcattacgtgtatcgttgtcgccggtgctgttctcggtatggtgaatacgatcatgacaaccgctgtgatgggttctgcgccggttgaacgttcaatcgcgtcttcagcctacagctcagtccgttttatcggcggtgcgctcgctccgtggattgcggggatgctgtcagaacacttcaccgcaagcactccatatacagtaggcgggatcgtcgtttttgtcggcatgcttgtccttctcatgggacgcaaacatctcgccggaataaaagccggacattaagaaaaaaaggaacttccgcacaggcgggagttcctttttgtgtttacagcactttcgtcgtccaagattcacaattccatgtttccgtcgcgatatccatgtaaaactcgggttcgtgggaaatcagcagaatggagcctttgtattctttcagcgcgcgtttcagctcttctttcgcatcgacatccaggtggtttgtcggttcgtcaagcacgagcaggtttgtttctgaattaatcagcttgcacagtctgaccttcgctttttctcctccgctgagaacggagacgcggctttcaatgtgtttggtcgtcaggccgcatttggcgagggcggcgcggatttcgtactgggtaaaggaaggaaattcgctccacacttcttcgatgcacgtattgttattggtttctttcacttcctgctcgaaatagcccgtgtattgatgctcgccccgttccaccgtgccttccagcggctggatttcaccgagcaggctctttaacagcgtcgtcttcccgatgccgtttgcgccgtacagggcgactttctgtccgcgctccattctgagattgagcgggcgtgacagcggagtatcgtagccgatgactaagtccttcgtttcaaaaatgagcttgcctgacgttctcgcaggcttgaaatggaattccggtttcggtttttcggccgccagttcgatcatatccatcttatcaagctttttctggcgggacatcgccatatttctcgtgctgacccgcgctttgttgcgggcgacgaaatctttcagctcagccacttcctgctgctgttttttataggcggcttcgagctgctgttttttcacttcgtagacttccatgaattgatggtagtcgccgacataacgcgtcagctcctgattttccacatgataaatcaaattgatcacgctgtttaaaaacggaatgtcgtgagaaattaagatgaacgcattttcatattcctgcaaatagcgtttcagccattcaatatgctgctcatcaaggtagttggtcggttcgtccaacagaaggatttccggtttttctaaaagcagtttggcgagcagcactttcgtccgctgtccgccgcttaaatcagtgacgtcgcggtcaagtccgacatcctgcaggccgaggccgcgggcgatttcttcaactttgctgtcaatcacatagaaatcattattagtcagggcgtcctgaatgacaccgacatcttcaagcagctgctcaagctcatcagggtccgcttcgcccattttgttgtaaatctcattcatttcctcttccattgcaaataagtaatggaacgcatccttcagcacgtcgcggatcgtttttcctttttcaagcacggtatgctgatcgaggtagccgacacgcacgtttttcgcccattcaaccttaccctcatcaggctcaagctttccggtaataatattcataaacgttgatttaccttcgccgtttgctccgattaagccgacgtgctccccttttaaaagacggaacgatacattgttaaaaagcgcacggtcaccaaagccgtggcttaaatcttttacggataaaatactcatcattacacctctatcgttatcagacacgctttttttatcatgtgtctttctcatttatgattataaaggaggagaccgtttgttaaaaggcttggaaggaaaaagaaaattgcgtttggcgcgtgcatttgagatactatggagtagattttaagaattgaggagaacgacatgacccaaacatggccatttttacagcatacacaaccatttatcgccgaaaactgggaggcctcaggctttcaggagccgaccgtcattcaggaaaaagccgctcaggtgattatggaagggaaagacgtcatcgccgaatccccgacgggaacgggaaaaacattggcgtacacgcttccggttctggagcggatcaacccggaacagaaacatccgcaagtgatcattttagcgccgtcccgcgagcttgtgatgcagatttttcaagtgattcaggattggaaaaaaggctccgatcttcgcgctttgtctttgatcggcggggcaaacgtgaaaaagcaggtggagaagctcaaaaataaaccgcatatcattgcgggcacaccgggcagggtgctcgaattgattcaggcgaaaaagctgaaaatgcatgaagtcaagacgatcgttcttgatgaagcggatcagctcgtgacacaggaacaccgcgaaacgatgaaaaaaatcattaaaacgacgctgaaagaccgacagcttttaagcttttccgctacgctgcagccggaaacagaacaggtgctgaataccatcgcacatgaaccggctgttttgaaagtggagcggaatacggcggaaaaagcgcgcgtcacacatcaatatctcgtctgcgatcagcgggataaagtaaagctattgcaaaagctgtcacggctgaacggcatgcaggcgctcgtgttcgtcagagatatcggaaatttaagcgtctatgcggaaaaactcgcctatcaccacgtggatctcggcattctgcatggagaagcgaaaaaaatggagcgggcaaagatattatcagcgtttgaacggggagaatttccgctgcttctggccactgacattgcggcgcgcggactcgatatcgatgatcttccgtacgtcattcacgcggacatcccgaatgaagacgggtacattcacagatcaggccggacggggcgggccggtaaagaaggaaccgtactcagccttgtcacgccgatggaagaatccaaattgaaaaaaatggccaaatcactcggaatcgagctgaaagaggccgtttattcaggcggaaaattatctgagaaataagaaacggagggcgggaagcccttcgtttttttttgttgtaaaataatagaaaaggttcaggcgggggcgggaagatggtttcaatagacagatttcaaatattgaaggaacgtgagctgaaaatacttgaacactggtttaagaacgataatatcagacggagaatggatgcgatgctgccattagacgcgtggtatgcacgattgaataaagatgaagacgatactgtcattatggcatatgacggggagtgtccggcaggcatggtctctatagagtttgtggaggagcgggcgtatatcggattgatcgtcaatcctttgtaccagcttcaagggtacggaaaacagatcttgcaaaaactgctgactgatcctgggtttaccggcgtgcgggaatgggcggcaagcatcgaaaaagacaatcaaatcagtttagcctgctttcaagcagcgggattcactttggaagatatggagccggatgaagacggctttcttactttgattcttcgcggctgatgcgaaaaaaagaaaaggaggggacaaagccctcctttttttcatcatcatgttaacttagatcactcactttgatgatctgtttgcctttgttttctcctttaaacaggccgaggaacgcgtcaggaatattgttgaatccttccgtaatcgtttcttcataatgaagctttccgtccttaagccattcggccaattgtttcgcaccttcggaaaagcggtcagcataatcactgacgatgaatccctgcatcagcgcttttgttttgatcagcttcggctggacgcgggggcccatgtcttcttcttcactttcggtattgtacgatgagatcgctccgcataccggaatgcgggcgaattcattcagcaggtttatcaccgcatctgaaatcggtccgccgacattgtcaaaatagacatcgacgccgtcaggacatgcctgttccagcgctttttgaatatcatccgccgttttgtaattaatggcttcatcaaattgaagctcctctgtcaaatacgcgattttttcatcagatccggcgatgccgacaacccgcgcgcctttgattttggcaatctgtccgactgttgagccgacggcgcccgccgcgcctgaaacgacgacggtttcgccttttttcggacggccgatatcgagcagcccgaagtaagcggtcagtccggtcatccctaaaatgccgagatacgcctgggcgggtgcgatatccgtatccaacttgcggagggcggactcattgacggctgaatattcctgccacgcgagatttccgatcacaacatctccttttttcagcttatcgccgtctgtcagaacctcggcaatcactccgcctgttatggcttcatctaaagcgaacggctctacatatgattttgtatcctgcatccgtccgcgcatgtacggatcaacggacacataactcgttttcacaagcacttcgccgtctttcggttcgggcacggcaatcgtttcaaagcggaaatcgtcatgggcgggaacgcctttggggcgtcttgccaattgaatttgctgctgatgattcggcatactgaatcctccttcaagataagtggttgttccaaatgtaacacgaaccatttcccgattacaaaatcaaaccgtcagcggtcataaaaaaagaagggcccagggcccttctttccttatatgcatatttaatagaataaccggtacacatcggtgtttttctcatgttccaaatattcataggcattcgtttttgaagaatgaagcatgtcagcggtaacgacgggctgaagcgcggtcagataagaacccagcctattttcaatttctttcggcagaacggattcgatatcaccgatattgataatgatagagaaaacgaaatcgatattaatatgaaaagtatcttcagcaaaggccgtaagctcttttattccatccgggcagcgggtatgccggcggaatacctgcttcactaaatcactgacaacccaagcgttaaatcgctgttccggtgaaaagtaatgaataggaaccacctccctgcttaatcggctcatgaagatttttatttttctgataaaagttgctttttctactgtaacatgtcccgccagaaaatatccaccgacaatctgcccgttttcccactgaactctctttcttttgtttgatccttgattgatcgggtaaacatccaatatacaaaacaaaagggaggacttatcaatgaaaccggtagtaagagaatatacaaatgatcaaaaactgatgcaggacgtaaaagagcttcagcaattgggtgtcgcaaaagaagacgtatatgtgctttctcatgatgacgacagaacggaccgcctggccgataatactgatgtcaataccatcggagcgaaagaaacgggcattaaacacgcggtcggcaatatgtttaataaaaaaggcgacgagctccgcaacaaaattcacgaaatcggcttttcggaagaggaagcatcgcaatttgaaaagcgcttagatgaaggaaaagttcttctgtttgtcacggataacgaaaaagtaaaatcatgggcgtaagctgaacagatcccaaggggttttcggtcccttgggatttttttgcggtttccgcaataaaaccgaaaggcacattctgtacattttcggtgctgtttctcaactgatttgatacaattcgattgtaataaattggaacaaagaatcaggaggagcacaattcatgaaaaaaatgttatttatgctggcggtttgtttatgtatgatccctgcggacgtctatgccgctgatctgggacggcagacgttaggaacaaatgacggctggggagccgcttccggcgggacaaccggcggcgcgaaagcctcttcatcgaatgtatacaccgtatcaaacagacagcagctcgtttccgcattagggggaagcgccaacagcacgccgaagattatttacatacaaggcacaatcaatatgaatacggacgaccgcaataaaacactcggctttaatgattataaagatccggcatatgatccgaacgcctatctgaaggcgtacgacccggacaaatgggggaaaaaagcgccgtcaggcacccaggaagacgccagacagcgatcgcaaaaaaaccagaaggcacgggtcgtgattgacatcccttcaaatacgacgatcatcggctcgggttcaaatgccaaagtgacaggcggaagttttaatataaagaacggcgtcgacaatgtcatcatccgcaacattgaatttcaagacgcttacgactattttccgcaatgggacccgacggacggcagcagcggcaactggaactctgaatatgacaatatcaccattaacggcgcgacgcacatctggatcgatcattgcacctttaatgacggatcgaatcccgacagcggttttccctactattacgggagaaaatatcagcaccatgacggccagacggatatagccaacggggcgaattatattacattgtcctataataaatatcatgaccatgacaaaggctccgtcatcggaaacagcgacagcaagacgtcggatgaaggaaaactgaaggtgacccttcaccataactattaccagaacatcgtccagcgcgcaccgcgggtccggtacgggcaggttcatatttataataatttttacgcaggctctaaaagcgccgcatacccgttcagctatgcgtggggcgcgggccacgcgtcgaaaatatatgcccagaataatgtttttgaagtgccgggactggctgctgataaagtcatcagcgtcttcagcggcggaaaagcgcttcatgaagacggcactcttttaaacggcgccgccattaacgcgtcggccgccaacggattaagtcagtccgtcggctggacaccgtcattgcacggttccatcggctcatcatcaaatgtaaaatcagatgttatatctaaagccgggtcgggcatattaaaataataaacaagaagcacaaaggaaaatattcctttgtgttttttaattaacaaaaacgtttattaacttagttaagtagtaaaatgggataggggatggaagacaacaaaataggaggagacctgtaatggcttcagaaaaagacgcaaaaaaacagcaggcagtaaaaatcattcctttgcttattactgttgctgtgggattaatcatttggtttattcccgcgccgtccggacttgaacctaaagcatggcatttgttcgctatttttgtcgcaacaattatcggctttatctccaagcccttgccaatgggcgcaattgcaatttttgcattggcagtcaccgcgttaacgggaacgctatctattgaaaatacgttaagcggatttggaaacaagacaatctggctgattgtcatcgccttttttatttcccggggtttcatcaaaaccgggctcggcgccaggatttcttacgtattcgtacaacggttcgggaagaaaacactcggcctttcttattcactgcttttcagtgatttaattttatcacctgccattccgagcaacacggcacgggcgggcggcattatttttcctattatcagatcattatccgaaactttcggatcaacgccggcagacggaacagagcggaaaatcggcgctttcttattaaaaaccggttttcaaggaaacttgattacgtctgcgatgtttttgacggcaatggcggcgaacccgctgatcgccaagctggcccacgatgtcgcaggggtggacatcacatggacaagctgggcaatcgcggccattgtaccgggattggcgagcttaatcattacgccgctcgtcatttataagctgtatccgccggaaattaaagaaacaccggatgcggctaaaatcgcaacggaaaaattgaaagaaatgggtccgtttaaaaaatccgaactctccatggtcatcgtctttttattggtgcttgcgctgtggattttcggaggaagcttaaatattgacgcaacgacgacggccctgatcggattatccgttttgcttttgtcacaggtattaacatgggaggacatcaaaaaggaacaaggtgcatgggatacgctgacttggttcgcggcgcttgtgatgctggcgaatttcctgaatgagctcggcatggtgtcttggttcagcaatatgatgaaatcttctgtttccggtttttcatggattgtggcatttatgattctgattgtcgtgtattattacacgcattacttctttgcgagcgcaaccgcgcatatcagcgccatgtatgcggcatttctcgccgtcatcgtggctgcaggcgctccgccgctgttggcggcgctcagcctggcgtttttcagcaaccttttcggttcgacaacgcattacggctcaggagcggctccggtctttttcggagcgggttatatatcgcaaagcaaatggtggtccatcggctttatcctgtcaatcgtccatattgtgacatggcttgtgatcggcggattatggtggaaagtattagggttatggtagaagaaaaaaaggcagactcaggtctgccttttttttatttctgtaaggaaggggaagggcctgcacatgatgactccagtgcgaatagaatatggacggggtgataatatgagcagcggccgtaatcaatacatgatattgaaacagaaaccttacaaatatatgagcagacatatgaaacgccggtatgaacaattaccatgtgaacatgaaaggccggaaacagggacagaaaaacggtttccgtcttcagatgaaaatcgatctgccttgtgcgtacccgggctgcgaggtcccgaaggcaaaagaggacccgccggctcccgcggtccgcaaggggaggcgggtccgcccggtcccccggggcctgaggggccgccgggagcggttcctgcggtagcttttcaaaatacagcagaccagatgatgattccgttagaaggaacaccgataaacgtgttaagcgcagtgatagccgcgccgacagatcaattggtgaaaacggatgccgtcatacaagtaaatgtggaattagatccgctcgcgtctcatttctcattggtcttagctgtcgatctgcaaagaaatggcgtatcgatacaaacacagagacaagagtggaacctcttttcttcaggcggacaaatcataggaattccttttacgtacatcgacgaaatgaaggcggatgaaacagccgcgtaccagctctatttatccgtcctttcttcgaattacgtaacacaagtcgcagcggcaaaccgctccctcattgcgacgggattccccattcaaggatcggattaaggtgatgaaaagaaatcaccttttttatttagattgtcaaaacacagcccgtattaataagctgtcttaataagtaagacggtcaacaacgggaaggagagggaaaaagattgaatgaataatccgattataaacggaagctttgaaaccggtacattagcggggtggagttcggcaaatacccagattaacagtttgtttgcacattcagggagatattctgcgcaatttattggagctcagccatatgcttacctcagtcaaatcgttccaatttcagccaagtcagtgactctattcgtatcactcgcaacgctcggaaatgagccaagtccccaagtaactctccagatcatctatgtcagcgcagcaggtgaacaaatcagttccattcaagaaaatattacacccggaaatttgccgaacgtgctctttcacacatggtctgaaatctataaaacaagcagtgtgccttctggcgcggcctctgccgtcattgtattaagtaaagtttcttccggcacggttttaatagacgacgtttcattggcgcaaaccgggggtgaacctggcgtaacgggaattacaggtcccacaggagtgacgggccctacaggagtgaccggagcaagaggagcgacggggtcgacaggatcaacgggtgtaaccggccaaaccggagtgactggtccgacaggagtaacaggggcgacgggagtaactggagctaccggctcgactggtgtaacaggagcaagaggagcaaccggaactactggctcaaccggagtgactggagcaagaggagcgaccggagtaactggtgcaacgggagcaaccggaactactggctcaaccggagtgactggagtaacaggaacaactggcttgactggtgcaacaggcccaactggttcaacaggagcaaccggagaaactggcgcgacaggctcaaccggaataacaggggcaaccggctcaactggagcgacaggtacaacaggcctaacgggtgtaactggtccaactggagtgactggggcaacggggataacaggatcaacaggcccaaccggccccaccggagtaacgggtccaactggagaaacaggggcgacaggagaaaccggtgcaactggatcgacaggagcgactggggtaacgggtgtaaccgggggaacgggaacaaccggaccgacaggcgcaaccggcttaactggtgcgacgggattaactggagaaacaggcgcaaccgggggaacaggtccaacgggtgtaacaggagaaaccggttcaactggagtgactggtgtaacaggagaaaccggttcaactggagtgactggtgtaacaggtgcaaccggagaaacaggtccaacgggagtgactggctcaactggtgtaaccggccgaaccggaataacaggctcaacaggaacgaccggctcaactggtgcaacaggcccaaccggatcgacaggaccaactggttcaaccggttcaactggagtgactggtgtaacaggtgcaaccggcgcaacgggatcaacaggcccaacaggatcaacaggcccaaccggtgcaacgggagtaacaggcccaactggtgcaacgggagtaacaggcccaactggtgtaactggttcaacaggagaaaccggagcgaccggtgtaactggctcaaccggtgcaacaggagcgaccggaataacgggatcaaccggagcaacaggcgcaactggtgtaaccgggctaactggaataacaggcgcgacgggcccaaccggtgtgactggaccaacaggggttactggctcaacaggagaaaccggttcaactggagcgacaggatcaacaggcccaaccggtccaactggtgcaacgggggtaactggagcaaccggagcaacaggcgcaactggtgtaaccggctcaaccggagcgacaggatcaaccggcccaacaggcgccaccggaaaaaccggttcaaccggctcgacaggcgcaactggctcaacaggtataaccggagcaacaggatcaactggagtaacaggatcaactggagtaacaggcccaacgggagaaaccggtccaacaggatcgacaggttcgactggggtcacgggtgtaaccgggagaacgggaccaaccggatcaacgggcgccactggaataactggaataactggaacaactggtgcaacggggtcaactggggagactggtccaacaggagaaaccggagaaactggtgcaacgggagtaacaggctcgacaggagcaactggtgcaacgggagtaacaggggcaacgggagaaactggcccaactggatcgacaggcccaactggatcgacaggcccaacaggaattaccggagcaacgggatcaactggtataacgggaccaatcggggcaaccggaataacaggagcgatcggaataacaggcccgaccggggatacaggagcgactggtgtaacggggacaaccggggtaacaggttcaaccggagtgactggagcaataggtgaaacaggagcaacggggctgactgggccaacggggttcaccggagtaacaggcccaacgggagtaacaggagcgaccggtgcaactggatcaaccggcgcaacgggtgccactggcataaccggagcaactggggtagcaggtccaatcggagtaacggggttcaccggcgcaactggtgtgactggcccgatcggcacaacaggagcgacaggctcgactggcctaactggatcaacaggagcaacaggagaaaccggcccaactggctcaaccggagtaactggctcaaccggagtaactggctcaaccggggataccggtccaactggagtaactggcccaactggagtaactggcccagcaggagtaacgggatcgacaggatcgactggggtcacgggtgtaaccgggagaacgggaacaacaggagcgaccggaataacaggctcgaccggtccaacgggggagactggaccaacgggagtgacaggcacaaccggaataacaggggaaactggggcgacaggaataacaggcgcaacaggtataactggagaaaccggcacaaccggcccaacaggtgtaactggggaaacaggtccaacgggatcaactggtataactggaataaccggctcaacaggcgcaacaggtggaaccggagtaaccggaatgactggtgcaacgggctcaacaggatcaacgggggtaactggagcaaccggagaaacaggcgcaactggtgtaaccggcccaaccggcgcaataggagagaccggtgtaacaggaataaccggagcaacggggtcgacaggagaaaccggttcaacaggaacaactggagaaaccggctcaaccggtgcaacaggggcgactggagtaacaggctcaactggtgtaactggttcaaccggagcaactggcccaaccggagtcacgggctcaacaggagtaacaggctcaaccggagaaacaggtgcaactggagtaactggggcaacgggagaaaccggcccagcaggagtaactggcccaacaggagtaaccgggtcgacaggaataaccggatcaacgggagtgattggggccacaggaataaccggagcaaccgggccaacgggagtaacaggagcaacaggcccaactggtgtgactggcccaactggggcgagtggtgtaactggtccaactggagaaagcgggtcaacaggagaaaccggatcaacaggagttactggcccgactggggtcacgggctcaactggtgtaaccggagtaaccggatcgacaggagaaacgggatcaactggtgcgacgggattaactggagaaaccggcccaactggaattacaggaacaaccggagcaacgggatcgacaggagaaaccggcccaactggaattacaggaacaaccggagcaacgggatcgacaggagaaaccggctcaaccggtgcaacaggggcgactggagtaacaggcccaactggtgtaactggttcaaccggagaaactggctcaacaggtgtaaccggtgcaactggagtgactggagtgactggggtaactggtgtaactggcggaacgggaacaacaggctcgactggtgcaacaggaccgactggatcaaccggcccaactggcccaactggggtaacaggatcaaccggtgcaactggagttactggcgcaaccggagtaacaggcgcaaccggcccgactggtgtaacgggatcaactggtgcgacgggattaactggagaaaccggatcaacaggagaaaccggggcgaccggtgtaactggtgcaacaggagtaacgggcacaaccggtgtaaccgggtcgacaggaataaccggagcaacgggagtgactggggccacaggaataaccggagcaaccgggccaacgggagagatcggcccaacaggagtaacaggagcaacaggcccaactggtgtgactggcccaactggggcgagtggtgtaactggtccaactggaggaagcgggtcaacaggagaaacaggatcaacaggagttactggcccgactggggtcacgggctcaactggtgyaaccggwgtaaccgggtcgacaggaataaccggagcaacgggagtgactggggccacaggaataaccggagcaaccgggccaacgggagagatcggcccaacaggagtaacaggagcaacaggcccaactggtgtgactggcccaactggggcgagtggtgtaactggtccaactggaggaagcgggtcaacaggagaaacaggatcaacaggagttactggcccgactggggtcacgggctcaactggtgtaaccggagtaaccggatcgacaggagaaacgggatcaactggtgcgacgggattaactggagaaaccggcccaactggaattacaggaacaaccggagcaacgggagtgactggaacaacaggtgtaaccggcccaacaggtgtaacaggaacaaccggagaaacgggatcgacaggagcgactggggtaactggtgtaaccgggggaacgggaacaaccggctcgactggtgcaacaggaccgactggatcaaccggagaaaccggcccaactggggtaacgggctcaacaggagaaactggctcaacaggagaaaccggggcgacgggagaaaccggatcgacaggtgcaaccggggcgaccggtgtaactggggcaacaggaataaccggagaaaccggcccaactggggtaacgggctcaacaggagtgactggagtaacaggcccaacaggagtagccggatcgacaggagaaaccggatcaactggtgcgacgggattaactggagtgaccggagtaacaggtgcaacaggagcaactggctcaacgggagaaacgggtccaactggtgtaacaggcccaaccggatcgacaggagaaacggggtcaactggagtgactggggcaacaggcccagcaggagaaaccggagcaactggaccawcaggagcaacaggatcaacaggagaaaccggaaccacgggctcaaccggatcgactggagtaacaggtccaactggtgtaactggttcaaccggagaaactggtccaattggtgtaaccggctcaaccggcccaactggggtcacgggctcaactggggcaactggctcaacaggagaaacgggtgcaacgggagtaacaggcccaacaggagcaaccggctcgactggttcaacaggcccaactggtgtaaccggctcaaccggtgcaactggagtaactggagcaacgggagaaactggcccaacaggaggaactgggtcaaccggtgcaacaggggtaactggagaaatcggtccaaccggagtaaccggtgccacgggagaaaccggcacaaccggagtaacaggcccaactggtataaccggagaaacgggctcaactggagtgactggggcaacggggataacaggagcgactggcgcaaccggagtaacagggtcaacaggagtaaccggcgtaacgggatcgaccggaataacaggcgcgacaggcttaaccggtgtgactggcccaactggtccaacgggagtgacaggatcaaccggatcgacaggagtaaccggtccaacaggcacaaccggagtgactggtgcgaccggagaaacaggatcaaccggagcaacgggtgcatccggggtaacggggtcaaccggatcaaccggcataacaggcccaacaggtgtaactggtataaccggatcaacgggtgtaacaggagtaaccggcccaacagggtcaacgggggtaactggagaaaccggatcaaccggcataacaggcccaacaggtgtaactggtataaccggatcaacgggtgtaactggagtaaccggcccaacaggtgtaactggtataaccggatcaacgggtgtaactggagtaaccggcccaacagggtcaacgggggtaactggagaaaccggatcgacaggcgcaacgggcctaaccggctcaactggattaacaggcgcgacaggaataaccggctcaaccggcccaacgggaggaactgggttaactggtgcaacaggagtgactggcccaacaggtgtaacgggattaacaggcgcaaccggctcaaccggcccaacgggaggaactgggttaactggtgcaacaggagtgactggtccaacaggtgtaacgggattaacaggctcaaccggcccaacgggaggaactgggttaactggtgcaacaggagtgactggcccaacaggtgtaacgggattaacaggctcaaccggcccaacgggaggaactgggttaactggtgcaacaggagtgactggcccaacaggtgtaacgggattaacaggcgcaaccggcgcaacaggctcaacaggagtaacgggcccaactggagcaacaggaccaaccggcgccacaggcagtacaccaaccttgctcttcacaagaaccaacgggccgctcactgtttatccgccgttaaatacagaagttcccattgctacgctggcaatcccggttaacgctttgcagaatgtaaagcttgattatgcactcagtgtcgcgctaacaactgcagccaattcaaactttgtttttgaggtgagattatataggggaacagtacaaattcatacaagaactctgtcgcgaactagtactaccgcagctacggatagtttttcgattgctgatacaacagtggatacagcaccgaccgcaggaacaaatacgtaccagctgagagttattttcacaactgcgaataatataacaacagcgacagctctcaatatcgattttaacagcattcgtttcccgacaacctaatacaacagcagactgatattttaaagatgaaagacctgacttatgcacagttaggtcttttttctgtaaatgctgcatgatgcagccttaaagaacatttaaaaatttgcccaatagaagtggggttttgccacacctttttttatcatggaaatattatgaaaatagaggtggtgtaatgagaaaaggagatacttggtataacagatacgactcttgggattacgactgccggaatagtaatgagtgttgctgtcattttcaacataaaagaagaaatcaaaggcgcagttatcaaaatcgggcacattgctgtgaaggattctgttgcgaaaactcttgctgtcatgaaagatggtgtccatgctgtcatccaaatcattttcatgtaagaggattcaccggagcaacggggtgcaccggagcaacggggctgaccggagcaacagggctgactggagcaacgggattcactggagcaacggggtttaccggagcaacgggctcgactgggaataccggagcgactggggtaaccggcgtcactggagatcccggcgcgactggagccaccggcgccacgggagcaacgggagtaacgggctcgaccggcgccaccggcgcgactggaataaccggtgccaccggggtaacgggagcaatgggattcaccggagcaacgggagtaacaggctcgactggaataaccggcgccaccggggtaacgggagtaacgggagtaaccggagcaaccggtgtaacgggagctaccggagcaaccggagcaaccggcgcaactggggtaacgggaacaaccggagtaaccggagcgaccggggtaacgggagccacgggagtaaccggtgcaactgggataacgggagccactggggtaacgggagcaacgggagtaacaggctcgactggaataaccggagcaaccggggtaaccggagtaacgggagcaaccggagcaaccggcgcaactggggtaacgggarcaaccggagtgaccggggtaacgggtgccaccggagtaaccggagcaactgggataacgggtgccaccggggtaacgggagcaatgggattcaccggcgcaacgggagtaacaggctcgactggaataaccggcgccaccggggtaacgggagctaccggagcaaccggcgcaactggggtaacgggaacaaccggagtaaccggagcgaccggggtaaccggagccaccggagtaaccggggcaacaggagcaaccggggtaacgggagtaaccggagcgaccggaataactggagcaaccggagtaacgggggtaacaggggatactggagcaaccggagcaaccggagtaaccggcgcaactgggataacgggagccacgggagtaaccggagcaaccgggataaccggagatactggagcaaccggagtaaccggagcgaccggaataactggagcaaccggagtaacaggagtaaccggagtaacaggagtaaccggagatactggagccaccggagtaacgggagccacgggaataaccggtgcaacaggagtaaccggagcaactggggtaaccggagcaactggggtaaccggcgccaccggagcaacaggagtaaccggggtaaccggagcaggcgcgatcattccttatgcttcaggtcttcccactgccgtgacgaccattgccggcggattaatcggaacggtgagccttgtcgggttcggcaattctgtaacgggcgtcaatgtcggagggggaggtgcaattgatctcaccggggccggaggaactctgctgaactttgctttttctgctccgagaagcggaaccattacatcaattgccgcttatttcagtacaaccgcagcattgtcgcttgtcggctcgactgttacgataaccgcacaattatacagttccacagtgccgaacaatacgttcacgccgatccccggagcatccgtcactttagctcctcccctcaccggcatattgtcaatcggcagcatcagcaacggaatcacgacagggctgaacattgcggtaactcctcaaacccggctgttaatggtattctccgccactgcgacaggcctttcgcttattaatacagtggcgggatatgcaagcgcgggagttacgatttcttaagtgaaaacggccagactggtgcggatcatctaagcttggagaagatatcactttttcttcaagcttttttgtttttacgtctttttgggtaaataaaggctgacgggaattccccgacagccggcagaagtatttacaagccttctgaagttaatcagtatcttaatgaagacgtctttagtgagttcgaatcatccgttgtgccgggagtgtgaatcatcatcgaaacagcggtgccctcatccggggtgctggtgatcgtcaattcacttccgcaaaaatgcttcagccgccgattgatatttttcaggccgacactgcgattaacgtcagaagataaaatatctttctgtatgtccggcatgatgccggttccattatcctccactttgataaaatacgtgttttcgccttgttttttcgctgtcagctttatccgtccgccgcctcttttcttactgatcccgtgatgaacggcgttttccaccaatggctgtatcattaaaggcggaagggggaagtcaatgtcctgttcaatatcaaaaaggatatcaatccgtttgccgaagcgtgttttttctatagaaagatatgacgtaatgatagaaagttcgtttctgaatgagctgatgtccgaagtgttttgaaaatcaaaactcatccttaaatagtttgtaaatgcagcagtcgtttcccgtgctttttcaatatccaaatggctgagcgcgatgatcgtatttaatacattgtaaagaaaatgaggcttaatctgcgactgaagaaatgccatttctaaatttgtggcttggtgagccgtatgcttcatcaaaattaaatttttaatacgcgcggtgaattcagagtaatgataaggcttttgtaagatgtcgtttgctccggcatgaaacgccttgtatttgtcatggctgataatggctgccgtaacgataagaaccggcagatcgaccatgctgaatctttcgcggatgtttgtgcagacttcaaaacccgtcatgtcgggcatcatcaggtctaatatgaccaggtcaagcttcgaggaagagacagcttgaagcgcctcttttccgctttttactgcgattacgttataaggaacaccttccagcatatcagttaaaattttcaaactctcgatgttatcgtcgacgatcagaatcgtcggagcatcgattttttctgagtgataaggcgtgaccagcgaaatatccgacattctctgtccgggctgtgattcaggaggttcggtctttgcttccggtaaagaatcaatttgagcggcgggtaacgtaaaatgaaaggctgatccgtgcgccgccgctgactccgcccagatgtccccgttttggagcttgacgagctgtttcacaatacttaaacctaaacccgttccatcttcttctgtccctcccgcttgctgaaaagaatcaaaaatggtttcaagatcagcctcaggaatgccgctgccggtatcggccaccgtgatttgaatcattttgtcattcaggttttcagcagaaagaataatgttcccttcggatgtgtacttgattgcgttttcaacaagattggttaagatttgccggaatcggttttcatctgcaagcaccaaagggaggccgtccggcacatgattaagaatggcaagttttttatgtttggataaaagccggtagaagttcatctcactgcatatgacggcatgcacatcgacgggaaccggacgaatctgcagcataccctgcttcattttttccaaatcaagaatatcatttacgagatcggaaagtctgtagcccatacggatgatcagctgcatattttctttctcttcctctatcgtcttcttttttctgccggctacaagagtttggcatatattaataatgctgttcagcggcgtcttgaattcgtgtgaagttttggcgataaattcatctttcagttggtcgattttgactaatttccgtgagaggacttcattgtcccggaaagctccggcgaattgctgcgccatcagaagaaccaccgccaataaagcgatgactgtcggcaatgaatagagcgaattaaaagaaaaagccgttttgccgctgtaagctgaaatggtcgtaagaatcacaaaagcgctcatcgagacggatgcgagtgtaaggtacgtgcttccttttatttttcttatggcggcaatcgtaaaaatatatgtaatataaaacagagtcgtaacggcaagcacagaatgtaaaatgtatgagagatggtcaatgaaacttccggacataaaatcagtgatcaagatggtcccggataaagcggttaaaatggtgatcgtcgtttttgaaacaatttctctgtatgcataaaagagataaagaaaaaccgccatgctgacaagcacggttgagatgatacgcaaggaattcagcaatgaaaatgaaatagacggaaagaggagaaagataattctttctttcccgatcataagaataatggcagaaaaaagcagacacatcacggaaaagaacaataaatgtttatcctttgtccgttgcagaaaaaagccgagaaaatataaaccggtaatgaaaaaagccgtaatcataatggaatcattgaaaaaggaaatttgattctcacgtataatttgttcttgagtcccaaacgttattggttttgcgatcccccagccgggaacttttccgaaattcgaaaaatgcaggacaagttcattgtcacccttgtgaagcctgaaaaaactgctgtacggtttgttctgcgccttaaaatcagctttttctgaaggattgccgctctgtccgattacttttccattaaggtaaaggcggtttgaactgtagataaaagatgtgctgatccccaaaacctgattgtcttcatttgatcggattgtcagtttgtacgtcccgtaatccacatcggccgttttgccgaacagcttcacattgacagggacatcaacgagtacgggattttttccttttgctgaatgaagcgcctgcggtgacagcatctgatttggatatagaatccatttcccgttcagctggacatttccatccttttgaaaatcccacttttccagattgatcacgccctgttccgcttgggggagggatgatcctgaaaaatgattcaggaccataaaaatcataaagaaagcagcgtagccgcaaataatcgaaatggaaataaatttttctttcacatcattactcctttatcccattcaggggcattctattatcctatgtaatgtataaatattgtaatcacaaacgttgtaatacaacaagagaaagaaaaagaatccaactatatagggcattggacatggtataattgaaattattttcagatatatctatattgacgggtgggatgcggtttgaaagcgttaattgtggatgatgaggaactggcattgcttcattttaatcgtatgcttgagcggacaaacgcctttcaatctattataacgtttcaagatccggcggaagttctggagcattcggagctttcatcagctgatgcggtgtttcttgacattgaaatgcccgggataaacggtattgagcttgctgaatcgattcaggaggtcaatgaaaatatccaagttatttttatcaccgcttataatgaattcgcgatcaaagcgtttgaattaaatgctgtcgattatcttttgaaaccggttgacaatgcccggctgctgacaactgttgagcgaatccgaatgaataaaaaactcaggacggcagaagagaataccgggacggattatgttatacaatgttttgggaacctggacttttatcaatcggtaaatggtgtcaaaacatacataacagtcaagtggagaacatccaaagcccgtgaactgtatgcatttttacttcttaatcaagggcgcacggtcagtaaagacatgctgatggaaatgttttggcctgcttatgatatatcaaaagcaagcacccagctctactcgacaatatatcagatacggaaattaatcggtcagctgcccttcagccaatcaatagaaaataccgatataggatacattctccggctttccggggtaaaggttgatacagttgaatgggaaaaaacattaaaagaggctcctccgctcagcgcagctgcactaacccggcatatggacattgtcatgtcatatgaaaaccattatctcatggagaatggctatctgtgggcggagccggaaaaagcgcgtctggcccatttgtggctcagcaaagcgtacgaactgattggttttctcatccaagagaagaatgatcatcaagcgatggacatttgcctgcaggttgagaaaatagagcccggtgacgataaaattatacaatacaaactgcagttatttaataaactgggaaaggtagaagaggcgataaaggaatacgaacgctataaacaattaaaagataaaatcaattgacgattgaatgaccggaccggctgatgccggtctttttttgtgcgctatttctgaaatgatcccatgtacagaatttgtataggccgatttcatacaatgtagtttggttcggataaggagaatcccatgcttaccggcttgttcgaacgtaagtctatataaaaggggaggaataagacttgggagtgaggaacttttcgttcagcccgaaaaaaagcaaaaggctgaggccggcattgatttcatgcttcacgctgtttttcatcttcagccaggttgtcagctttactccgatcgcagccgcttccggatcacaacaaagcgagagcgggttctttgattcagttgcagtcaaagacggcagacagcagactgttgacgggtcaaaagccagtgaaccggctttagcaccgggagataaagtgacactgacatacgaatggtcactaaaaaacaaggaagatgcaagcgaccggaatatcaccataaagattccggaaagttttacattagataacgatgccgaaggtgagctgacatcagctgatcgggtgatcggtatatataaagctgaagcaaacagcagcacgctggaagtgaaagtgaacgatgctggagcggatgccggggatgccaaaggctccattacactgtcggcgaagtttactcccgacataacagatgagacgaaaatggcaaaagctctttttcaactggatgccggcaagacccagcaggtgttaatacctgtgaagaaagacggaacaacggattccgaaacagaaaaaaacacctcttcaacacctgctgaacctcaggaaaagacagagaaaaaatcagcatctgcagacggcggggagaaagcagaacagacaacgaaaccaaaaccttctgctaaacgcagtcaatcaaaaatggcggtttcaagcaaatctgccgctaaaagccttcaatcaggcggaagccggattacgcaaaatattttaactgatgtgaaattgactgatgaaaaaggaaaaccatatgacaaaaacaaccctgcgaatacgaactctccggcaaatatcaccattcaatgggcgattccgaatgagctggggaaaacaataaacgacggtgatcgatatgaatttgatctgcctaaagaatttatcatgcataatgacattacgaaccagccattgaccgacggcgatagtacgtacggaactttttccattaatacgagcggccatgtcatcatgacgtttaacggcgaggtaaaagaagattctaacgtcaaggggtcattgtatgtaaacacccaattcaatcagaaagaaataaaaggatcaaccacacaaaagattaagtttccggttaactctgatacgccggacgtaacggtttattttaaaccgaatgtcaataaaaccattgagaaatcagggtcattcgataaaggtattaatcccggaaaggtaacgtggacggttgatcttaataaaaaggaagaagaagttaaaaatgcgaaattgactgaaagccttccggacgaattgattttccgctctgtgaaagtgtatgaacttgatgtgaatattgacggctcggtgagtcagggaaatgagataacttcaggttataccgttggcgaaaacggtagtgtcaccttcgccgggacgatcgattcagcctaccggctcatatatgacacggaaattaaagatgaggcaaagccgggtaaaggcggaaacatcacgctgacaaacaaggcggcattcagcggagacaatgcggagccgatttctgcggaagcttccgtaacagcgggttacggaaaaatgatagaaaaatcttcgacaggttataaaggagaatcccaaacgttcagctgggctgttatgtacaactacggtgagaaaaagattgatcaatccaaagccggcatcaaggatacgttcggatcagacgatctgcatcttgttcccggttcattgaaaatccttccgattacattcagccagaacggcagcgaacaagagggcgccccattaaaagagggtgaggattatacgctgactgataacgggaacgggtttgaaataaaattcaagcaaactgtcacaggagcatataagatcatttatcaatctcaagtcaacgatggggtcattattgacagtcctgtcaaatacaccaatacagcaatgacagatacaggggaatcaaaggaaactccgggaaccgccattcagcagaatctgatcaaaaattattcaaatgcagactatgagaagaagacggttgattggacaatcacagttaataaaaacggttacacaatgaaagactggacgctggatgatcaattcaccagcggaggcctggcgctcattgacgattcatttcacatgcaagacacgactgataacaaaacgctgaaagaaggaacagactatacattaacaaaaaaacccggaaatcaaggctttacaatagcattgatcggggattatgcagaaacaaacagtcagtttaagatcacgtataagacaaaattcaacgctgacttttcaaacgaacccattaagaatacggctgagtcgacatggacggataaaaacggcggcaaacgcacaaataaggaatcgagcggcttcacaccgaacaatcagacgtcccataatggattcaaaaacggctcatacaacgccgtttcaaaagaaatcacatggaaagtcggcattaattacaatggcgaaccttcaaagaatccttatataaaagatacgatcacagatggtcagcaatttttgcatgggtcggttgctgttaaaacgtataccatcagcaaaaacggctccatcactgaaggagaggcgctggattcttcaaaatatgaaatagaggagccgtcagacggcaacaaaaatacgttaaccgtacgtctcaaaacagatgacgctgtaccatacctgattgaatttaaaacgtcattaaaaggccaggtcattaaacagagtcaatacacaaacaaagcagagtactttaataatgaccacgcagaccgaacgctgacgggttcagtttccatcgcaaacggaggaaacctgatttctaaaggcggcaaacagaacggaaacgatatcgattggagcatcaatgtcaatgccagccaatcgacactggatgacgtaaaagtcaaagacaccccggatgagaatcaaataatagatgaagattcttttaaagtatatcaagcaaaatataatgagaacggcgttatgaaagacagcagcggaaaccttattccgggtgatgtgaagcttgaaaaagataaggactataaactagatataaaaactgacaatgccaccggcgaacaatcatttgtccttacctttacaggcagctataaacaaatcgaccgcgcgtatgtcatacaatatcgttctctcattaatatttccggcagcagcggtcaggtcagcaacaaagtgtcgatatcagggacaaatgttgaggagcagacccaagagaacaacagctcagtgtttgtcgccatttcaagcggcggcggctcaggatcaggagagaagggaagcctgacgatatctaaaacaggatcagacggaacatctctttcaggagccggctttcaattatggtctaaagacggcaagcagctgctgcgtacgggcacaacagacgatgccggtaaacttacgtttgggaatatccgttacggaacctatgtactgaaagaaataaaagctccggacggctacaccatcagcgatgcttatgtaaacggggtctccgttacgattgacggcaaatcctccgctgcaggagcactctataaagtcataaatcaaaaaaataaggtgacgcttatcaaaaaagacgaaaacaacaagcctttggccggtgctgtatttaagcttgagaaaaaatcaagcgacggcacctatactctgataaaaaataatattgaaagcgataaaaatgggaaagttgagatcaacggtttgcccgccggatactatcggctgatggagacgaaagccccatcagggtttatcgtaaacacaaaagccattcacttctcaatcgcaaagaacgaaaagaatcaagtacctgatgttgaattgggatcaatggtgaattatcaaggaaaagccgcattaacgaagaaagatgcagacggcgggaatcttgaaggcgcagttttcaaaatcatcgacagtgatggaaaaacggttcagaaagatctggtttcagataaggatggaaaaatagaaacatccggccttgcacccggtcattacgccttcatcgaaacgaaagcgcccaacggatatgtgttaaatacggagaaagtggagtttaccatctcagaaacagcggaaggaaagccggagtcaactgacgcaggaacggccgtcaactataaaggctctgtccggctgacgaaggaagatgcggaaggccgaaaccttgaaggcgcagtcttcaaaatcgtcgacagtgatggaaaaacggttaaagaagatctggtttcagataaggacggaaaagtagaaacatccggccttgcacccggtcattacgccttcatcgaaacgaaagcgcccaacggttatgtgttaaatacggagaaagtggagtttaccatctcagaatcggcggaaggaaagccggagtcaactgacgcaggaacggccgtcaactataaaggctctgtccggctgacgaaggtagatgcggaaggcaagaagcttgaaggtgcagtcttcaaaatcgtcgacagtgatggaaaaacggttaaagaagatctggtttcagataaggacggaaaagtagaaacatccggtcttgcaccgggtcattacgccttcatcgaaacgaaagcacccgacggttatgtgttaaatacggagaaaaaagagtttaccatctcagaaacagcggaaggaaagccggagtcaactgacgcaggaacggccgtcaactataaaggctctgtccagctgatcaagaaggatcaagacggaaacgttttagacggtgcagtatttaaaatcattgacagtgatggaaaaaccgtaagagacgatctgatgacaaaagaaggcggcaaaattgacgccggcggtttggcgcccggaaactatcaatttgttgaaacaaaagcgccggatggttatctgctgtcaacaacccctgtgccgtttacgattaaggctgagaacagcggaaaaccgaatcaggctgccctgactgcagttaacatcaagaacagcgttgttctcacaaaattggatcaaggtgacaaacggaaagtcctgcaaggtgcgaagtttaatctgacagatgcaaacggcaaagtactgacagagggtctgacgacagatgagcacggacaaattattgtacggggactgaaagcgggcgaatatcaatttatcgaaacaaaagcgcctgaactttacagtttggatcaaacgccaatatcattcaagatcacaaataccgacataaaaccagtcgaaatcagtgcggagaatacactgacgcctggtgatgtcacactgacaaaagtggatcatgacgataaaaataaggtgctggaaggtgctgaattcaagatcacggattctgccggacatccggtaaacaccggcggcagcaaagaacggccggcggtatggaagacggatcaaaagggccggtttacggtgaaaggattagcgcccgggcagtatcgatttatcgaaacaaaagcgcctgacggctatcagctgaacgaaaaaccaattgaattcacaattgaaaaaggacagttaaaagccgttgaggtcgtcgtttctaataagaaattaaaaaatcccgcacctgggaaagacacaccgaatcatcaaacgaatcaaggcgggcatcatcctgataccaatggtaaaaccaatcactcggatacaggcaaaaacctgccgaaaaccggtgatacggacggtatgatgccggtcacggccggtattctgctgctattagccggcggagccgcggctgttgtatcaagaaagaagaaagcaaggaatagatagacgttatcgcacctgatcatgtaagaatcgatcaggtgcttttttaaaaagagaatcatttctcaccaaatattcaccgcatgacgtacaagaaaggaattttcttcatggttaaaaaaatgatcattgccgttcttattttgtccgggctgcttctcatttcctctcctctcatgaaaggctgtttgatcgcgtacctcagtaaaagccaaattgaatcggaattgaccgcagaacaagcgcggaaaaataacatgaaaaaagcggactatgattttgaatccattcatccgcccggtttcagggaaacagttcagtcaagttttaatcgcaaaccaaaaccgataatcggacggataaccatcagcagcatcgatttagaccttccgattttaaaaggcacaaccaatgaaaacctgctgatcggcgcggcaactatgcgtccggatcagaaaatgggcgagggaaactacccgttggcaggccaccatctgaagcaggagaacctattgttcggccctcttttacacataaaaaaaggcgcgcaaatcgtgatgaccgactttagaaaagactatatttattctgtaacatcaaaaaccatgatttcagaaatagaagcaaacgcaattcaggagacaaaagataaagagattacattaatcacatgcgacaaagcggtaagaaccgaaggacgcctggccgtcaaagggaaattgattgatatttccggtcattcaaatgtatctcggccatcatagagaaacactttttcaactgaatatacgtccgctgttaaacatcccgagactggcttctgtcagtctttttttgcgcagcgattataaaaagttcatccttcttatctctcttgagggaaattataccagactgcactttttgaaagaaatgacaagagaaaaagatcacgaaaattctaaaaagtgagaaacaaagatttaaaaagtggtatgattttaggaggaaaggacggctggtgctgtgttggaagcgaagcggttttatgtctctctgcaaatgaaaatcgccggattaattgcggctttattaatacttgtcatcggaacgctcacagttatatttgcctttcagcaattaaaggaaggccagaagcaggctgaacagctggcggtgcaaacggcaaaaaccatttcatacatgcctcctgtaaaagaggcgttccggcttgcggatcaagaggcttttacaaagttagatgtcattgaacaaatgaaagaacaggcaggcgcgcacgccgtctacatcactgatcaaaaagggcatgttgcatttcattcggcccgaagcagtattccgaaagaaaatcaaaatctgcaaaataaaaccgtcatgttcggcgggtcaccggtttccgacggaatgaaggctgtccgggggagcgccccggttattttggaggaaaaaaatcataacgaagtcgtcggaacggtgacagtcgagtttttacaagatgagatagaaaaagatatgaaagcgcatctgcggcatttaggctattttgcatgtttggtgtttcttatcggcatcgggggagcggcggcgctcgcaaaaagcatccgtaaagatacactcggccttgaaccgcatgaaattgcagcgctgtacagggagcgcaatgcgatgctccttgcgattaaagaagggattatcgccgtaaacaaagaaggcgcggtaaccatgatgaatttatctgcggctgatatgctgaatcttccggaaccgatgatcggaaggcatataaaagaaatcatgccgggcgcaaatctcatgccggtgttggcagggggagaattaccgccgaacgtggaggtgcgtgccggagataaagtatttatcttaaacgtgaaagaaatgaagcagaccggacaagtatacggagcggtgatcagcttccgcgaaaaaacggagctcaagaaactcattaacaagctgactgaaatgaaaaaatactcagaggatcttcgggcgcaaacgcatgaattctcgaataagctttacgcgatcctcggtctgttagagctgggagaatataatgaagccattgaactgataaaagaagagtacgccatccagaatgaacagcacgaaatcctctttcaaaacattcattcacagcgggttcaggccatactattaggaaaaatgggaaaggcgtctgagaagaaagtgaagctttcaatagatgaaaacagctttttagaatcgctgccggagcatgtgggttcatctcagctcattacgatcatcggaaatcttattgataacgctttcgaagccgtcgccgaaaaagagaaaaaagaggtcgccttttttatgaccgatatcggcagggatatcgtcatcgaagtggcggactcaggagacggcgtgcctcaggaaaaaacagaaacgatatttgaaaagggctactcttcaaaggggacgaggagaggatacggcttagccaatctgaaagaagccgtcagtgaattgcagggatcgatagagatttcgcagcaaaagagcggcggtgccgtatttacggtgtttataccgaaagaaacgccaaagggggaatctttgtgattaacatcgcgattgcagaggacgactttcgaatagcgcaaattcacgaaaaatttatcgaacatcttgatggattcaatgtcatcggtaaagcaatcaatgccaaagacaccatatcgctgcttgagaaacggcagcctgatctgctgcttttggatatttatatgcctgatgagctggggacagatctgcttccccttatccgcggccgttttccttccgttgatatcatcattattacggcttctgccgaaacaagactgctgcaggaagcgctcaggtcaggcgtttcccactatgtcataaagccggtgtcggcacataaatttacagaagtgcttttgcagtaccgggaaaaaagagaatggctgcactcacagccggagctgagccagtccgttatcgacatgtttttcggaagcggtcagaaagaacaaaaacagctcaatgatctgccgaccgggattaattcgattacacttcaaaaaatcaaaaacgcgctcagggaagcccaaaaagggatgacggccgaagaactgggcgaaaaaatgggcgcctccagaacaacggcgcggcgctacgccgagtttctcgtttctcaggaagaagcgctcgctgaattagagtacggcattatcggcaggccggaacggaaatattatttagcacatgaataagggatgggagaaatgaagcggttgggagtgcttcttgtcatgctggcggcgctggtttcttttgacggacggcagatggcgggcatccgttcagccgaagggccggttgaaattgtcgtcccggcggcgcctcaagggggctgggacgtaacggcaaaagctttgcaatcggttatagagcggaagcaaatattaggccgtcccgtaaagatcgtctataaacccggcggaggcggagacagcggctggaaatatgtaaacgaacgaaaaacggatgtcatcagtatgaattcaagcctgctgttaagcaatgaaattttgggacaaagccggctgaaggcagctgattttacgcctttggccattatcgcaaaagagtggcagaccgtcgctcttccgaaggattcaaagataaaaagcggaaagcggctgctcggcgatattaaagcacatccgggcggcataaaaatcggatttgcgcccggcctcggaaatgatgaccagctctcctttgcgagagcggcggaaatggccggaatttctccgtttgatatccgcttttttcaatacgggagcagcaatgaagtcattgaagctcttatcagccacgagatagacgccgcctcaatgaccatttcagaagcgagagacgcctatcggaaagggaaaatcacattggcggccgttacgtcggacaaaaggctctccggcttcagcgatgtgccgacatggaaagagcagggggtgccgtttgtctttgcgcactggagaggcatcatggggccgaaagacatgaccgaaggcgagatcgcctattgggatcaggctttgaaacagattacctcatccgcggagtggaagcaaatgttgaaaaaacgggattgggagagcttttataaaaacagcagcggcgcaaaacgctttttagaagagcagaccgagttttataaagagatgatgagcagcgaaaaataagccttccgcatatttgcgggaggctttttatttataaatgaacaaaatgaacgaaaaggttataaaaaattaaaaatctttaaaatccaaaatatttacttcaatatccaattctcataagatagcaaaaaggcggataaaggggatcgggcctttaaaatgtaagcgtattcatgataagggggacatactgtgttagcaatcttaggctttcttatgatgcttgtttttatggtgctgattatgacaaaacggctttcagtgttaacggcgctcgtattaacgccgatcgtgtttgcgctgtttgccgggttttcttttaaccgggtcggcgagatgatgatttccgggattgaacaggtggcgccgattgcagtcatgattatgtttgcgattctttatttcggcattatgattgataccggtttatttgatccgatggtgtcgcgtattttaaagctggttaaaggcgacccgctcaaaattgtagtcggaacagccgttttaaccatgcttgtcgcactggacggagacggctcgacgacgtatatgattacgacaagcgcaatgctgcctttgtatatcatgctcggaatccgtccgattattttagcgggaatcgccggtgtcggcatgggtatcatgaacacgataccatggggcggcgcgacgccgcgtgcggcgagtgcgctcggcgttgacccggcagagctgacggggccgatgctgcctgtcattgccagcggaatggtgtgtatgattgtggtcgcttatgtactcggaaggatggaaaggaaacggctcggggtgatcgaattaaagcagccgtcccatacaaatgaaacggctgcggctgaggaagatgaatggaggcggccgaaactgtggtggttcaatttactgttaacgctttctttagtgggatttttagtgtcaggaaaagtgaatttaaccgtgctgttcatcattgcgttttgtatcgcgctgattgtcaactatccgaagcttaacgatcaaagggagcgtatttcagcccattcgagcaatgtgcttgcgatcggttcgatgatttttgccgcaggcgtgtttaccggaattttaacggggacgaagatggttgatgagatggccatttccctcgtatcgcttattccggaacagatggggggatttattccggcaattgttgccttaacgagcggtatttttacatttctgatgcctaatgacgcctatttttacggcgtgctgcccattttatccgagaccgccgtggcgtacggtgtagataaggtggaaatcgcccgcgcttcgatcatcggccagccgattcatatgttaagcccgctcgtgccgtcgacgcatttattagtcgggcttgccggggtcaccattgatgaacaccagaaatttgccatgaaatgggcggttcttgccgttatcgtcatgacggcctttgcgctcatcatcggcgcaatcacgattttttaacataaaacacccggttcgtcgcacactaaaggcatcagaggaggtgccatgatgagtgatccgtttatgccgcttttttcagtgagaagcggggccggttttaaagcggcggacggcgtttacggactgaccgtgcagattgcgaatgtttactttatcgaaaatccctcagctccgcgggaaatcattctggttgacgctggaatgcctcaatcggcggagatgataacagaagaaatgaaacgccggttcaaagaggggtatcagctgaaggcggtcattttgacacacggtcattttgatcatgtcggtgcgattgaagagctgcttgagctttgggatgtgccggtttacattcatgaaaaggagctcccgtacgtcacggggaaagcggattatccgcctgccaggcccgatgtgaaaaaggggcttgtcgcaaagctgtcaccgctgtttccgcgccatacgatccgcattccgtccgttcaggcactgccttcagacggtaccgttccgtttcttgaagaatggaaatgggtgcatacgcccggccacacacccggccatatttcattattccgggataaagaccgcgttctgcttgccggtgatgccgtgatcactgttgaacaggaatcgcttgcggacgttgtcattcaaaagcaagagcttcacgggccgcccgcttattttacagcggatacgcagacggcggccgcatccgttcagaaactggccgaactggagccggaagcgcttttgacgggtcacggaattccgatgacgggaaaaaactaccgtgaggatttgcttacactggctgaaaaactgcattccgttttgtaaaacacctgcgaacatcacaggtgttttttctttgcagtttccagtatgatacaaaaaaaccattgtgttcactcctaaaaacgatacaatgggaaacagatgtaaattgaaggagagagttttttgaaacatacggaaatactttgggatgaggcgaaggattttattgatgtctgctatcaggaactcggaatggaatcgcaaatcaacgcgcgtctgcacgcgataaaagatgagatagatcggacgggaagttacgtccatacggcggaagagcttgaacacggggcgaaaatggcgtggcgcaacagcaaccgctgtatcgggcgtctgttctggcaatcgctgaacgtcattgaccggcgcggtgtgaacacgaaagaagaggttcgcgacgcattatttgaacatatcaaaatcgccacgaacggcggaaaaattaaaccgacgattacgattttccctcctgagaagaatggggaaaaacaagtggagatctggaatcaccagctcatccgctatgcgggatatgagactgaaaaaggaagagtcggtgatccggcatcatatgagctgacggctgtctgcgaaaaactcggctggcgcgggaagcggaccgattttgatattctgccgctgcttttccggatgaaaggggacgggcagccggtctggtatgacctgcctcagacgctcgtgaaagaagtgccgatcacccatccggatattgaagagtttgccgatttaaatctcagatggtacggggttccgattatcgccgatatgaggcttgaaatcggcgggctgtcgtacaacgcggcgccttttaacggatggtatatgggaaccgaaatcggcgcaaggaaccttgctgacgaaaaacggtatgatatgctcaaaaaagccgctgcggtcatggggatttccgccagcctgaataccgacctgtggaaggatcaggtgctggtggaactgaataaggcagtgctctattcatacaaaaaacacggtgtcagcattgtcgatcaccatacggcggcgaatcaatttaaacgctttgaagaacaggaacaagacgcgggaagaaagctgacgggcgactggacctggctgattccgccgatctcgccggcttccacccacattttccataaatcatatgacaatacgattgtgaagccgaattattattatcaggacaagccttatcagtaactgatggtaaaagtgcggtaccctttcagacggtgtgattcttcgatggttatgccggtgacatttgagaaggggctgccttttctgactgcttcggcaaattgttttaacgactcttcaggaccttcggcaaggatttccacccggccgtcatcacggttttttacccagccggctaccttatgtctgtcggcttccatctggacgaagtagcgaaaacctacgccctgaacccggccgtctgcaatcatatgatattgaagcatggaaaaaccacctttttcttactatgataaaggaaagatatgagatttcgcaaaggatgtgaacgaggtgacgcaagactattctgtcttatctatcaatctcggaaagcccgcaattcatgaatttgccggcagacaaatcaattccggcatcataaagcggcccgcagattctcccgtcatgctgtataaaacccattttgacggggacgggcaagccgacttgaagcatcacggaggccccgataaagcggtgtgcgtgtatcccgccgagcattattcatattgggaaacaacgctcgcgagaaaacttcccgccgccgcgttcggggagaatgtaacggtcaaaggactggccgaacaagacgtgtggatcggagacgtctttcagctgggggaagccgtcgttcaagtaagccagccgcgccagccctgcgtcaaactcgcgctcaaatatggcatcaaagatatggtgctccgtgtacagcagacgggatttaccggcttttatttcagggtgcttgaagaaggatatgtcgatccgcgtcccgtcctcaagcgtctgtcgagaggaaaagaaagcatttccgtctggtatgcgaatgaagtgaaatatcgtgattccggcaatctgtcagcgattgaagaaatactgcgggaagaagcgctgtcagaaagctggagggagtccttccttaaaaaaagagacaggctcactaatgtatagaaaaaagccgtgctgcactgacagcacggctgatttacgttatgcttgtttttttgtttccagcagattggcaaggaagtactttttgaagctttgaagctttcttccttcatagtgggtaattccttttttctttaactcttctacataccagcctttactgccataatgcatgtcagaaaactcctttctccgttctcccgttgaggagagtttcttcagtttttgccaaacttttggcattgtaacatctataaaaagacgctgaaaagggataacgcaaaaactgagacttcagattcagagatgtaaagctttcttacatatatatgtaaagggcggtcttttcatgcttaatggccggttaattttaacagcaccgttccgagtgtcatgattccgaaaacgacgccgaaataaaccagcatccccttctttttcttcactccgtaaacggtaagaatgatgctttcaataaagaaaataaacccgaagataataaaccacatgttgaaaaatggctcctttcacagacatatgtccagtgtagcacaactcttataacggagcataaaaaagccgggcactgtatcagtgtccggcaagtttgacgagaagctgggccaaatgctgtttttcattgtcatccgcaatgtcccacagttcttgtaagagtttttcttccgcattgcggggctcctcgtgtttggcgagatagtccccgaggatggcggcgcttttgatgattttgctgtcatccagacccagtttttttccggcggaaattttctgatgaaggtacgccttaaattcctcgaaatcctctaaaatctgctgtttcgttacgccgtgcatggcgtgtatttcgttttcgattttgattttttctttatcttttttcatgcgtctccctccttcgggttagttgttgtatacctgtttggaagggagatgaaacattacaatgcagttaaaataatcggtttgtcttttgtgatcacgatggtgtgttccacttgggcgacaaggcttttatccggcgttttaaacgtccagccgtctcccgcttcaacaatcgtttccgctttcgtggaaataaacggctcaagcgcgatcacggttccgtttttaaacagcgcgttatcaaacggatcatagtaattcatgatgtggttcggcgcttcatggaggtttctgccgattccgtggcccgtcagcgttttaataacggtaaatccattggagcgggcttcatgatagacggctctgccgatctggttttggcgtttgccggcttttgcctgatccaatcctttctgaaatgcggatgctgcgcaattacaaagcttttgcagacgttcatcgccttctccgagcacaaatgaaattcccgtatcggaataaaaaccgccgaactccgccgaaatatcgatatttacaagatctccggcttttaagattttagaggcgctcgggatgccgtgagcgacttcgtcatttacgctgatgcatgtcacgcccgggaaatcgtattccttctccggagcggaagcggctccgtgctcgtcaagcaccgcctttccgatcaggtcaagatctttcgtgctcatgccgggctcggcttttttcttcatttcttcacgcgccagcgcgacgattctgccgatttttttaaggccttctaattcttgatcgttcgttacaatcattgtcattcccgctttctatttttaatcatctgattcaagcttaccacaactggtttataaatagaaaaccaacaagccttatgtgaataaatgaaggaaaattggtatagatcactagataacttatgtggtatatttaagaaaaaagaagggggatgggtaaaatgcttcaatttttgcaaaaactcggaaaatcatttatgcttccgattgccgttctgcccgccgttggtattattttggccattggcagagaggacttattaaatattccgttcatttacgcggcggggaccgcggtatttgatcatctgccgctgattttcgcgatcggaatcgcgatcgggatttcgaaagacagcaacggggccgccgctctgtcgggagcaatttcttatatcatgctggacgcggctgtaaaatcaatcaattcgacaaataatatggccgttttcggagggataatcgcggggttaattgcgggatacacgtataatcgctttaaggatacgaagctgcccgaatatctcgggtttttcagcgggcgcaggctcgttccgattgtaacggcgctgattaccattattttggcggggatcttcggatttgtgtggccgccgattcagtcggtgattacgtctttcggggaatggatgatcgggcttggcggaatcggcgccgggatttacgggatttttaaccggcttttgattccattcggtcttcatcatgtgctgaataatattttttggttccagtttggcgattttcacggaaaaacgggagatctggcccgcttctttgcgaaagatccgacggcgggaacttatatgacgggattcttcccgattatgatgttcgggcttccggccgcatgtctggcaatgattgccgcggctaagccaagtaagcgcaaagcgacggccggaatgatgatcggtctcgcgctgacggcatttattaccggaattacagagccgattgaatttgcatttatgtttttatcaccgcttttatacggggttcatgctatattaaccgggttctctttatttatcgtgaatgttctcggaatcaggtcaggtttttcattctcggcgggggcgatcgattatctcctcagctacggcattgccgaaaaaccgcttttgctgctcgttgtcgggctttgttatgcagtgatctattttgtcgtcttctatatgctcatcaaaacgttaaacttgaaaacgccgggacgggaagatgatgaggaagaggaagaagtgcttagtgaagatacggccggttccgtcgaagaacatgccatgctcaaggggctcggcggcaggcaaaacctcgaaacgattgatcactgtgcgacccgcctcaggctgactgtgcaggatacgtctctcattaatgaagcggcgcttaaaaaagcgggagcaaaaggggttatcaaaacggggaataaaacggcacaggtcattatcgggccgaacgtcgaatttgtcgcggaagagctgagagaagccgtccgccttgacgatcagaagcagacttgataaatccggatcacctatgtgatccggattttttttgaacatatatcaagtttcacataatgtacaaaaaacaacgttttcttctatgttaagattcatgtagaacaagtatggagatgatgtaaggtgacatggattgcagttgtttcaattgttgtcataagcctgattaagattgtgctgacatgccttcctaccggagcggtggaatggatcctccgcaagtttgaaacccattcaaagctcagtgacgcgtccgctgccgtttccctcggcggaaaacgtctggaaggcgaagacaaacgccgggtgattgatgattttaacgaagccgtgtttatcgaacggcattatatatacccaggggatgaagagcgttatcttcatccgcaaaacggagctgatccgcttgtcattaagacgagaaaagggaaaaaagatgtgacggtgtttgtatacagctacgaagatcatgtagatgtcgtcaaacagcagaaaaagaaagtcgtcgcttattcagttctttccgacagcctgcaaaagcgctctatggccgccgccgggagctgaacataaaaaagccagatcattgatatgatctggcttttgtttattctttttgatcatctgctgaggaatcttcacgcttcgtataatcgaattgtgaaggatccactttcttaaagcctttcggctgatagaaacgaagcagatcgccgttgatgatcttatcagacatttcaagctcagtcttgacgagagagtcttcttttttgtcgacttctgaatcatctaaaagtcttccggttttcgtatcgtaatacttgccggacactttcgtatagttcggcgagatgaagtctccgttacggaacggaatgacttctctgtgctctttcgataagatatctgaacctgacatgagataatctttcgtatcgacgccgagcagatgaagaacggtcggcgcgacatcgacttcaccggcaaatttatgattgcggccgcctttcacgccgggagcgtggataaagagcggcacccgctgaagctgggcattgtcgtattcagtgatctcatctttgccgagcactttcgccatcgctttattatggttttcggagatgccgtagtggtctccgtacatcacgataatcgacttatcgtacaggccgtcttttttcaggtcatgaaagaactgttcaattgattcatccagatagttcgcggactggaagtaattattaacgactgaatcgccaaagtctcccgcagggaagtccgtgtcttctttatccattccgaacgggaagtggttggacagcgtaatgaacttcgtatagaacggctgcggcaggctctttaagagcggcatggattctttgaaatacggtttatctttcatgccgtagtttttcgtgttttcttcgctcatgtcataataagcggaatcgaaaaacttatcgatgccttccgctttgtacatttcgttacggttccagaaagtctgcgtatttccgtggaaagcggcagacgtgtactttttgccttttaagatcgcaggaacggactgcagcgtgttttgcgctttattgacgaaaaccgaaccttgcgaaagcgggtacagagagttctccatcataaattccgcatcagatgttttaccttgtcccgtttggtggaaaaagttatcaaagtagaatgtttgattatcgtgcgccagcttatttaaaaacggcgtcacttccttgccgttaattttatagtcaatgataaaggattgcagagactctaatgagacgtagatgacgttttttccttcggcttttccgaagtagacgttattcggcacgtcatagttggccttcatatagttttccacatccgttacatcgcttgaatcggcaagcgcgcgctggctgtttgatttcacattctgcacggcatcgtaaatcgtaaagttgtacgtgcccaagtatttcaccagatagtttcggtcaaatgagcgtgtcaaaagctcaggacggtcggattccgcgacggcgaggttgatcaggaacataagcacggcggaagccaaaacgattctgaatgatttcttcgccggtttttcagccggttttctcatcttaagggccaaaataatcaaaatgacggtatccaggaagtagaaggcgtctgtccatctcattaacgagaacgcgctgtctccgagctggccgccgtttgtctttgcctgcatcatgaccgggatggtaatgaaatcattaaagaatctataatagacgatgtttgcaaaaagcaaaaaagacaataaaaaatgaatcacaataatggctgtctgctgtaattttttcttgaaaagaagcccaaatccaagaaagaacaagctggagctcagcggattcacaaaaagcaatattttctggatcgtgttgtctatgccgaggttaaagtttaaaatataagcgacatatgttttcacccacaataacacgaccgctatcaagaagaaggcaagtcctctttcttttataaatgttttcattgttacactccttttttccgatcacggtttaaacggaacgatagaaaaaacgaacgtaatcaatataccatgaaaccagcaaatagaaaaggtggaaaaggctcatcggaaaaagggcgaaaaacgctgtcgcaacggcggttaatctgttgaatgacagctttaaaacatataaatggcacaaactgggatttgtgtttccgtatgatcatacccggttctattgaaaaaagaggtgaacagtgatggatattgcccatatcgtggctgaagataaaatcaagcgcgccattaaggacggagagttcgccggcatcaaaggaatgggaaagcccctgccgaaagacgatgccgcacatcttccggagtcgctcagaatgggctaccgcatattaaaaaacgccgggatcgccgaggatgagggcgcgctgaagaaagagctgatgacgctcgattatttgatcgccaagtgccgcaatgaacaggagcgggatcacttgcggaacaaacggacggaaaaacaagtcagactcgacaaactgacggaggagaaagccatgttctcaaaacccgcatcttctcattataaggagaaagtgtacagacggctgggccgcccgtaagccggctctttagatttttttctgaaaaggaatgtgctccataaggcgcgggtaggaaatgtggagcaggccgtttacgcactgcgcctgtaacaggtggggctcagccggttcaggaagctcaatcgtctcatcgatttccccgtaataccggttttggcagacgcccatgttctttggaaaaaggggtgtgatgtttcctctgatatgcagccgtgttcttgacagcagcctcaatgtcaattcttcttcgtaaacgccgggcatttccacaatgacgaatgtgtgctgttcatcctgataaatatcataagtcagggtgtttttttgtaaggagaaaaaatcttcgggagatttccgtttcaggacattggtccaaaagtcgctgggcttgtgctcgttcgtaatctcaagccactttctcattttttcgatatccacttcggcagaacctccctatatttgatttgcgatcggcattgacgggttggcgatctgatcctgatcgctcacgtcagggtcaagatggcccgaattcaaacatccggcggccggcgaaaaatcccctaaagaaaagttcgcgccgacaaatttgctgttggcggtgtggctgttttgtacggtctgaccgatatcgacgtttccgttttgcgttgctccgtttacttttatattgacgacgttaatttggtaaggcattcataaaaacccctttaatctataatgggcggcaccggcgtaatatttgcggtatctgcggttccgatggctgtctggtcgttgacatcaggatcatttaacaagttctccatcatcgattctataggtgacgtatcgccgaatgaagagttcagtccttgtgatttgttatttgtggtgggactgttgtatgccgcttccccaatcgtaatagatccgttgccagaaatactgttaatcttcaaatagtacaggttgataacagtggatggcatctcttcacacctctttaacttagttgtacagtactgtatgctttttgtgctcctgttgtgaattccgcccggacatgttcccgataaaacaagaagtcaaggcccggttccggcggggctttttttgtttcagggtctttcgcagtatatttgtgatgaaagcgctataaaaatagattgacgacatgtatatacatcattacaatagagtcataaacatgtatatacaagtttgtaagacaaaatgaaaacggttacggaggggttggcatgggtgagtttaaccgggctgcgcggcagatcgctgaagctgtcggcggaatcgaaaatattgaggcggcgactcattgtgtgacgcgtttgcggtttgcattaatagatgaaaccaaagtaaaccaaaaaatgcttgatgcaatagacattgtcaaaggatcttttgcggtaaacgggcagtttcaagtcgtgatcgggcaggggacggtcaacaaagtatatgcggaattagtgaaggaaacggggatgggtgaagcgtccaaggatgacgtgaagaaggcggcagcgcaaaaaatgaatcctttacagcgtgctgtgaaaacgcttgcggacatctttattccgatcttgccggcgatcgtcacggccgggcttttaatgggtctgaacaacatcttaacggcggaaggcattttctacagcgccaaatcgattgtccaagtgtatccgcaatgggcggatctcgccaatatgattaatctgatcgcggggacggccttcgcttttctgccggctttaatcggctggtcggcagtgaagcggttcggaggaagcccgctcttgggtatcgtgctagggctgatgctggtgcatcctgatctgttaaacgcatggggctacggggctgccgagcagagcggcgatattccggtgtggaacctgttcggccttgaggtgcagaaagtcgggtatcaaggtcaggtgctcccaattctgctggcgtcttatttacttgccaggcttgagctctttttgacgaaacggacgccggagggcattcagctgttagtcgtcgcgccggtgacgcttttggtcatcggttttctatcctttgtcatcatcggtccgatcacctttgcgatcggtaacgcgctgacggcgggattgattgccgttttcggccaattctccgccatcggaggcctgctgtacggagggctgtattcggcgcttgtgatcacggggatgcaccatacgtttctcgcggtcgatcttcaattaatcggatcaaagctcggcggcacatttttatggccgatgctcgcattgtcaaatatcgctcaagggtcggcagctttggccatgatgttgattacaaaagataaaaaacagcgggggctttcactgacggccggcatttccgcatatttgggcattaccgaaccggcgattttcggcgtgaatctgcgttacaaatttccgtttgtgatcgccatgatcagctcgggaatcgcggggatgttcatctccgtcaaaggcgttctcgcaagctcggtcggagtcggcggcgtgccggggatcttctccattatgagtcagtactggggtccgtttgcgatcggaatgctgatcgtactgattctcccgtttgcgggaacatacgggtatgcgaggctgaaacggcaaaaatagaaaacctgctgggcgccttctatcaggctgtcccttttccctttcaattcaaaacattacaggcggtgaagaaaaatgaaaacagacagcacaccatggtggaaaaaggcagcggtatatcaaatttatccgaagagctttaatgatacgacgggaaacgggatcggtgatctgaacggtattatcgagaagcttgattatttgcagaagcttttaattgatgtcatttggcttacgccgatttacgattcgccgcagaatgacaacggttatgacattcgcgattattgcaccatttatgaagaatacggaacgatggaggattttgaacgccttatcgatgaagcgcacaaaagaggaatcaaggtcgtcatggatcttgtcgtaaaccatacatcagtcgagcatcggtggttcaaagaagcggtctcgtcacccgacagtccgtatcgggatttttacatttggaaagacggaaaggaagacggccgggcgccgaacaactgggaatcaaaattcggcggttccgcttgggagctcgacccggcgtcaggccagcactacctgcatttatttgatgtgtcgcaggccgatttgaactgggaaaatgaagagatgagaaaacaggtttacgacatgatgcatttttggttccggaaagggatcgacggcttccggctggatgtgatcaacctcatttctaaagaccaatcgtttcctgatgccaaagatgggcgtgacgggcgcccttattatacggacgggccgcgcgtgcacgaatttctccatgagatgaaccgggaagtgttttcgaaatatgacagtatgacggtcggtgaaatgtcctcgacaacggctgaccactgcatccggtacacaaaccctgagaataaagaactcgatatgacttttaactttcatcatttaaaagtggattatccgaatggtgaaaaatgggcgctcgctccgtttgattttctgaagctgaaacggattttagcgttttggcagacggagatgcaaaaaggcggaggctggaacgcattattctggtgcaaccatgaccagccgcgggccgtatccagatacggagacgacggcgtataccggacgaaatcagccaaaatgctggcggcggccattcatatgatgcagggcacgccttacatttatcaaggtgaagagatcggcatgggcaattcgaaattcgatgacatcggctcataccgcgatgtcgaatcattgaacatttacaaaaagatgaaggaagaaggcgtgcccgaaaaagacattatcgccattttaaaagagaaatcaagagacaatgcaagaacccccattcagtggaacagcgggccgcacggcggtttcacgacgggaacgccttggattccggcggcggatgattatcgggacgttaacgcggaagcggctttgcgggacccggattcaattttctatcattatcagaagctcatcaagctcagaaaagaatatgacatcgtgacggaaggaacgtttgagctgcttgctgaagacgatccggcggttctggcgtacgtcagacacggcaaggatgaaaaactgctgtgcatcaacaacttctacgggaaagaagcggactttacggttccgcttaaagacacggacggctggcggtttacggtgctgctgacgaatgatgaaccgagggatgggcggccggaacgattgacgctccgtccgtatgaatcgatcgtttatcatctgacaaaagcgtgatacactaatctgggtggtcaaatgaaagtgaataaatacatcacaatctataaagatatggtgcggcagatcgaaagcggccagcggaaggctgaagacgttcttccgtctgaaaatgatttgtgcgatcaatacggcacatcacgagaaaccgtccgcaaagcgctcaatatgctggcgcaaaacggctacatccagaaaatcaaaggcaaaggctccgtcatattagacagagaaaaaatgcgttttcccgtctcaggcctgatcagcttcaaagagctttcggaaacgctcggaaaagagacgagaacgacggttcaccgtctcgggctgatcctgcctccctcagaagccgcaaaagagcttggtacagaagcggatgaaaaggtgtgggaagtcgtcagatcaagacggattgacggagaacatattattttggacaaggattactttgtgaaaaaacatgtgcctctattgacgaaggcgatttgtgaagattcgatctatgagtatctcgaaggagagctcggcttgtccatcagctacgcgcaaaaggaaattgtcgtggagccggcgggggaagaggaccggaagtatttggatctcggcggattcagccatatggcggtcgtgaaaaaccgcgtctttttggaggataccagcctctttcagtacacggaaagccggcacaggctcgataaattccgtttcgtcgactttgcgagaagagaaaaataaaaacggactgccgcggcagcccgtttttttgtcagtatcaaaatgaatactatccaacaaaaatgtgcgtactggtactttcaaaaataatggctacaatagtacataacgattgaaaaggagagatcatgaatgtcagataaaaaacagcagatcatcgaagcgtatcaattcagacacgccacaaaggaatttgatcctgagaaaaaaatttcagaaagcgattttgaattcattttagaaacgggaagattatccccaagctcactcggtttggagccttggaaatttgtcgtcgttcaaaatccggagcttcgtgaaaaactccgcgagttcacctggggcgcgcaaaagcagctgccgaccgcaagccatttcgtacttctgcttgcccggacggcaaaggatatccgttttgacgccgactatgtcaaaaaccacttgcgggaagtcaaaaaaatgccggaagatatgtatgaaggctatatcagcaaaacggaagacttccagaaaaatgatttcaatctgctagaatcagatcgcgcgctgtttgactgggcatccaaacagacttacatcgccctcggcaatatgatgacagccgctgcgcagatcggaatcgactcctgccctgtagaaggcttcaactacaaagaaattcaccggattcttgaagaagaagggcttctggaaaacggaagtttcgacatctctgttatggccgcattcggctaccgtgtcagagaaccgcgcccgaaaacaagatctgcctcaaaagacgttgtaaagtgggtataagataaaaaaggctgccgggcgtgtcccggcagcttttaacgtttatttggttttgctaaaaaacaggcggtgatccaggacgtaacgggaatgatgatgccgatcccgattccggcacaaagaatggtaacggcttccgcactgaatacttttgagttcactattttttcagctgagtatgataagtctttaaaccagataattaaagccaaatagctgccgaaaaaagcaaagaataacgtattcgtattcgttcctaaaatatctctcccgatgcttaatccgaatgtgtacagatcttttctgctcatggacggattatgactgtaaatttcccgcatgggtgaagtaatggaaatcgcgacatcggtaatcgcccctatcgtgcccatgatgatcatggctgcggtaaccttcacaaaatccaccccgacaaacagtgtgaatatgccgatatcacccaattcttcttcaccgaatccctgaatcgaagtatgttttgttacagacataataaaaaacagcagcagtacaatcgtcagcattgcagaaataaaggcggttacggttttgacgtttcctccattaatataaaaaagagtaatgctgcaaatcacggcggaagagagcaatgttaaaacaatcggattgatatgcgggtctgtcatgaaaatgatggtgagaaagagaacaccgaaatttaagaataacgcaataaaagacctcgctcctttttttccgccgatgatgaccatcaatagaaataaaatcgccgcgagaattacgatgacattcatgagcttgccttctttcgtttaataaaaaagatagaagcatacagactggcgggtatggctaatacaattccgatccctccggccaatgctctggctatttccaaggaaatgttcatagaaagagtgaatcctatcggggaatcatttttcaaatacaacagcatcatcggaatagagccgcttatataagcaaaaaacagaatgttggtcatcgcccccatgatgtcttttccgatctccatccctgaacgtctgagagcttgtaatgagatacccttgttttcttcatataatccgaagacagatgatgtcatggtaatggctacatccatgaccgctcccagtgatccgataaataccccggccataaacaccgtgtgataagggcgggttaaatactgcatttcctcatatctgagacctttctctccggttgccagcatcaccagatacgtaatcagcagggaaacgaaagtgcctgcgagcgtcgcggcaatggcggcgtatgttttcgcgtgaaaaccgctgacaagcagcaatgagatgacagtaaagatgagaatacagataccgcagatgaaaattaaccctatattaggatgcttcctgtacaaatctaatgcaaacgacagtaaaacggcgttaaacatcaggctgacgatcgaaaagaagccttgtttttttccgacgataagcaaggtgaaaatgaaaacccacgcgatcagcaaaagctgtttatcccgttttttatctataatgcttcccgatatatccttgtttgatggtttccctttatcaatagaaacgaatacttcatcgccaatcgaatatttctgatcgttcgctccggatgatgaatactgattgggcaaatgaatgagctgtcctttctgactgccgttttcaagtctggcagtgatcgtctgattgaaaatcttatctttgtttttatgcatgtcctgtacgtcagactgatgttccaatgttgttttcgtcactttggcaatcggccgctcataaaaagaagcgttgtgagtgacgaaaatgagcgagctgataaaacagagcgctgttatcacgtaaaacagctttttcttgtaagacatgcggtttcgtttgtgtcctgttatcttcaaaaaaagtcctccaaacaggcggcgccgtatgaaagagaggccctgccgtgaagtgttaaacgatgcggatgtatgtctctcgcgaataacgttcatattttatcactcggccttacggctgtcgactaagagggggaccgagagaaaaagctcccctgaaatcagatcaggagagcttttggatgaaccgcccgataaaagcggtctttttatgcttcgttcactttttttgcttttcttctttgatgcagatacagtgccgttccgagcgcgctgatgagtaacccggcaagaaggatggaatacatcgttgtggccgtatcaggaagcaggccgcccggcgatactccgtcctgcgcagggccggatgacggtttttgtccgcttggctgctttccggagccttggtctccgcttggcggcggcgcgctcttcgtgtttgcgtttaatatggtgtattcactgaaatgatttgtatagcccgtgacgagatcgtgtgaaaccgaaccgttgtctgtttttgtatagacgttctttttccggtctacatggtaaatgcccggctgtttcgcctttttcgtattctcaatgcgcagggtgagctttaccggcgctttgaatgttttgatgtctttgtttttctgcttcattgtaaagtcgtatacatttgaaagcgccccgcttacttttcctttcggcgtcacgccgaatcgtgtatcagctgaagcagcgtttgccatcggcattttcatgctgaacttgtcatgcaggatcgtaagggaagaatccgatgttctgtcctttaacaggccgatttgttttttggtcacgctgagatcaatcggctttttggcgccgtcattcttatcgtaatacacgatcggcgtgtttgcgtttttggcataggcggcaaatgcgctgtcaccttcaagcgtccacgaaccgtttttttgtttcgtcggcaggtacacttcctgcgcgcggccgtcaactttcggttccaccgcttttcccgctttttcaagctgctcggtgaagacctcatagtcgacaaagccaaggtcttctttatgggacgcttcgttaaagacggaatatccgtctccgccttcaccgacaaagttactggtggcgactctgtatgtcttcttatcagaaatcggctttacgctgccgtcatcctgtacggccgcagcttgaagaacgcggtgtcccggctttttattcagtgtaaacgtgtatgttaaaccggcaacttgagggaaggcgccgccttgagcctcaattccgcttaacccttgttccaaggcttgtttgatctgttttccggttaaatccgcgacgtaaagcgtgttgccgaacggcatcacattcagcacatcgccgagtgtgatgtctcctttatcaatgcccgcgcggatgccgcccccgtttgtgatcgcgatttgggcgccggccgcttccttcgctttttgcagcatgccgtccgcgatgaagtttccgagattggtttctttggagcggacatgctcgcgctggccgtcaagtgcgaccttcgttgagccgactttttcatttttgactgagacgagctcttttttaaacggatcaagctcttttttcagatccgggtcttctttcgtctgctcgttcactggaatcgcctgaagagaggattgttccggcaggacgatgccgtttttgtcaaatgcgacatctgcccggcctaaatattcgccgtattcttttgcttgggcgacgatggtcggctcttcgtttttgacaacttccattttatttacaagcgtatgcgtatgtccgccgacgatcaagtcgatgccttttacctttttggcaagatcgagatcacgctgatgcccgatatgtgtcagggcgataattttattgacatgttccttattctgtatttcttttactgtatcttgtgcggattggaaggcatcatgaaagacaatgctttttcccgggcttgatgtgacggacgtatcttctgtcgttaagccgaatacggcgactttttctccgtttacatcaagcagaatgtatggatagatgcctgcttttttctttttccctgccgtaaatgtgtctgcttttttcatgaatggtctgagttttgactctttggacacatcgacatttgagctgacgagcggaaagtcaggcgcttgaaaattgtattttccggacgggtcagccgcgctcccgttaccgctcaggaagctggcgagagcacccggacctttatcaaactcatgatttccgaaggtcattgcgtcgtagcccatgcggttcatcaattttaaatcagccagcccctgccactttgtgaaatagagatcgcctgagaaaacgtctcccgcatccagcaaaatgctgcggtcggtttcgcttctgatttctttgattttcgtcatccgcctcgccgcgttatcaaggtgggcgtgcgtgtcgtttgtatgcataacggtgagtttccatgcatcatctttcggcggatctgtgcccggttcatcatctttgaattggagcttgtactgtccgtagcccgcgttttgtgattcaccgatataggcgacgtcatctgcgcggtcggcaaacggctttgcggccaaggaagattcaaatgtcaggtttgtccctttgaccggaaggatggaccagttatgatcagcctgcggattaatcgttttctgctggatgatgtaatccattaagacctgcctgttctcatcggcagaagagtatacgattttatcattgcttaagtgagggaatcctccgccgcctgaagcgcggtaattatttgtgacgatcagaaattcctgcttggcgctgacgggctttccttgataagaaaggttgacgatccggcttgcatcgggatgaatgactgttccgttttcgttgtatttcgccggttttgtgacatcgacctgataggtgacaccgtcaatgacatcaaaattgtatgagcggtaggcgtcatttaaaagcgcttggctgccgccttttgcctgatcgatctgattaaattgccccgcggacatttcgagccagtctttcacttcgcttccgttcagcttgacgatctgaaccgtgttgtcatacaggtacaaatcgccgatgtttttgatggcgaggtcgccagcggaaatgtttgtatagtagtttgagccgttccgcccgccggctttaaacggggcgcccgccgagaggataggcagatctttgtattccgtatccttcatcttattttcggcgtaccatttttgcgcatccgttacgatttgaatggacggatcatctttgacttgggcgaagaaactgttgatatcggcttttgtctggccgacgggttctctgatgtatttcaatgtgccttcgtgcgcttttttgacggtattgacgacggtttcgttttccgacgtcacattgccggcaatcggctcgatgctgccttttgcatcttccacatgccacgcgctgtctgttttttcaagccggaggtcgatgacgcccgcatatttgccccagctgcttgacatgacaacggggatgccgttaatcgtgcctttatcgatgtcaaattgatcagcgcctttgtattcggcatcagggaaaagcccgtgctgatggccggatacgatcgcatcaattccgctgactttcgttgccaggtcaaaaacggcgttttccgctccggaagactgcgcttttttttcgatgccgctgtgggcgagggcgatgacgatatcggctccttcagctttcattttcggaacggttttctttgcggattccacaatgtcttcgacctgaacgcggccttcgagatttttcttatcccacgtcatgatctggggaggaacaaagccgatgtagccgacttttatctgatgcttgccgccgttttcatccgtgacggttttgtcttttatgacataaggcgtataacggttttcgccgcttaatgttttcacattggcgttaacgatcggataatcagcgcctttgattgtcccgtccagaaattcaagcccgtaattaaattcatgattgccgagtgttcctgcgtcataatgcagactgttcatcacttcaatgatcggatgggtctttgcgcctgaaataatatcatttttctcatattttacggcgtattctccgaggggattcccctgaatcaggtctccgttatcgacaagcagcgtattcgggttttcgcgcctgtgcttctcaataagctgagccgttcgggccagcccgaattccgttgtcggtttgtcgctgtagtaatcgtagtccatcatgttagcgtgaacgtcagttgtggctaaaatgctgagattcacactggaggatttgttttcttctgctttaatgggtgatgttgggaggattagactaagtatcataactagtggcagcagaatacggagtgtcatattgacgctgcatcgtcttttctgtattctcacctgttctccacctttcaacaaattttgtcatgcagtaccattgtaagaatattttgtgaaagttcatatagatttcatgatgattcttgtaaaaagatgaaaaatgaggataatgacctatgtgaaacggatgagcggcaaacgcgttacctatgtttgatgttagtgtggctggggtacatggatttatgtagacttcatcaagcaggaggtagtaactatgggtaaaaaaattgcagttgtattaaccgattattttgaggatgtcgagtatactgaacctgcgaaagcttttaaagatgcgggtcatgaattaaccgtaattgaacaggaaaaaggaaaaacagtcaaaggcaaacaaggggaagcggaagtgaaagtggatgcgtccatcgatgatgtaaatccgaaagactttgacgcattgctgatcccgggcggattctctcctgacatgctgcgtgcggatgaccgtttcgtccaatttgccaaagcgtttatggatgataaaaaaccggtgttcgccatctgccacggacctcagcttctcatcaacgcgaaagcattggacgggcgcaaagcgacagggtttacatcaatccgaatcgacatggaaaacgcgggcgcaaatgtggtggatgaagaagtcgtcgtctgccagaaccagctggtcacaagccgcacaccggatgacataccggcattcaaccgcgaatcattaaaactgcttgcgtaatataaaagcggagcgccgtatcaggcgttccgctttttttgtgaagattcccggataaccagctcaggcgccagaataatgcgttgttttttgtgctgggaactggtgattttatgatgcagcaattgagccgcttcttttcccgactgccgcggaaaggaagaaacagttgtaagcgggggataagaaatttcagcttccggcacgttatcaaagccgacaatgtcaatatcttcgcccggaatgagcccggcttttctgatcccttgcatgacgccgaacgcgaccaaatcactgaagcagaaaatcgcggtcgggcgctcagaccggcggaggagctccgtcacggcttcacagcctgcttcgcgggtcggcgcgctgtcaatgacatagtcatttttcacttccagatccgcttcacggagcgcttttttaaaccctttcatgcgcttcgtccatgttgatgagtgcttcacgccgcccagaaacgcaatctcctgatggcctttctcaatgaaatgacgcactgccttataggtgccttcctcataatcggctccgacaaaatcacagtcggcatcggcaatctccctgacggcgagcacgaccggaatgtcaagctgctcaaggcgggaaagggtttcctcagccgtacctgaaaccggacacaaaatcaatccgccgaccctgtgctccagcatggtcgagatcagctgctcctgcttggcgacggaatcaaatgtcgtgcctaacagcactgttaatccgacttcctcaagcgtattctgaacgccgatcagaaactctgagaaaaacgtattggaaatgtcagtaataatcaatcctaccgttgtggacgtctgtgatcgtaaattcgcggcgacccgatcatatacgtaccccagctcccgcatggattgcagcactttctcacgggtcgcttcggaaattcgcggattattgcggacgattaatgaagcggtggatgttgagacgccggcatgttcagcgacctgctgcaatgtcacccggcgttttttttgctgtttcatacgtcgtattcctcacttggtttttattcgttacatccattataagcgttttggcgcatgagaagaaagagagagggggagaaaatgataaagcgccggaagacggattgtccttcggcgcttctgtcacaataggttattcaaacatttgctctttaatatactgaacaggcatttcacggcctgtccaatattcaaacgccatggcgccctgccaaagcatcatgccgaggccgttaatcgtgttgcagccggccgcttgagcttgttcaagcaatttcgacgtaacggggttgtaaacgacgtctgtcacaatcaaatcaggacggagcatggatgtatcttcaatgacgctcaagccttcaagcggtttcatgccgacacctgttccgtttgtgaaaatatcgcttgaagcgatttcagcacgcagcgcatcttgatcttcgagcgggaagactttcgctttgcaagaagatcccttcatttcttcattgatgatgcggacgttttcttccgctttttcgaaaaacgcgtcattgcgggcgaaaatagagatttctccgagaccttccaatgcggattgaatcgctatcggagtggcggccccgccggaaccgaccagcgtcatttttttgcctgtgatatcgatgccgtgttcttttaagttgcggacgtatcccataccgtcagtggagtgtccgatcagtctgccgttttcattaacgactgtattcaccgcgccggtgaatttcgctgaatccgcgagttcatcgaggtaagggagaatgttcatcttgttcggcatcgagacattgaagcctctgacgtttaaggcgcgcattcccgttaccacatcttccagctgttcattgccgacttcaaacgcgaggtaagcgtagttcaatcctaattttttaaacgccaggttgtgcatcgttggagataaagagtgtccgatcggtgttgcgaataatccgataagctgagtttttccgttaatccgtcctaaatctttcttcatgatgtattcctccgttagtccattcatttgtttttcatcccgctttgagggcagaaaaacgctgattacatatgtttatttaaaatgctgagtacgctgcgcaattcttcaacgggaatctgtccgggcgctgatgcttctttccccgcgccgaacgtgcacgctgagccgaagacttcgccggccaggcggctgatcaggcctgttcccgccattgacatcgtgatgatcggccggtctgcgtattgtgttttcatcgtatgagtggcatccaataagacgaaaacatcttcagtgctttgcggcatcaccgcgattttcggaatgtgcgcgccgtacgcctgcatgttccgcagccgggaaatgatttcttcttttttcggtgtctgatgaaaatcatgattggacatgacgacatatacgccgttgtcttcagcggttttcacaattgatttgacttccgcttctcccgtaaacaactcaacgtctgcaaggtcagtgtgttttgtttcgatggcggttttaagcaattcaatgtaaaagcggtcatcaataactttatttccgccttctttatgagttctgaatgtgaaaagcagcggtgttgcgcctgcggctttccgcagcatttcaagcatgtcttttacggcgtccaggctgtcaacatgctcgtacacatccgcccgccactcaatgatatccgggcgaagcctgttgacggcttcaatttcttcgagcagttctttctctccggccgccatcagcggcacaatgatcttcggaagcccttcgccgatgaccgtgtttctgatcgtgatagattgcatgataaatcctctcccttaaaaaatagtcaggctttcatcacttgcttaaagcggattccgataaacaatgcgagaagggcgctgacggccgcaattccgatatcaagcagaaaaacaggcgtcaggccggccgctttggatatcgctcccgttacaagcggaatgacaataaaagataagcttgatgctatattaacaaaagatgtgattgtacctttatttttagggaataaaacagccataaccgtcatcgccaattgcagaatgcccgcagttgaaagtccgatgacaaaggagctgatgactgatacggccggctgatgaatgaaaatcagagcaagcagcgcgattgccgcgatcacagggtacagcaccattaccgtaatcggctgaatcactctgtttaacagcacagccagcaataatacggacacaagcgcaccgatgctgtaatagctcagcaatttgacagcctgcacctcaggcatgcccaaaacggtttgcccgaacttaggaagccatacttgaacgagcataaacagcgccgtagatgaaaagcctaacagaatgatcgcaagaccttcgcgccatatcgacggctgtgatgtgaacgcgtcatcagacggagaggcttccgtccggccgccgtcttctttttgcttatgattcggaaacggaacttttaacaggaaaaagccgttcaggaagaaaataatgcccggtacgaaaaacgtccagccgtaaaacaaatgcctgtccgcaataaacgcgatgaaaaacggaagcaccgtcgcgccgatggatacaaacgctttgattaacacggttgcagagcttgcgtttttcggaaatccttcaataagcgccggatatgtcccggaatccaagaaggaattggcgatccctgcgaaaatggcgaagataaacgcggccgtatagtttgtcgaaagcggaattccgattaggaaaatcagatacagaaaggcgcccgacacgataaacggccgtctcccgaatgtatccgaaagcttcccggcaaacagaagcgaaatcagcttcccgatcccgatggcggagaccaaatagctgaccccggctgcggatgtatgaagctgttttgataatgcctccatattggatgcgataataatattgatcatgcccagcaggaaataattaatataaagacccgctgccattttggtgtatatgtttttcatggtgacatcccctaatgcggttaataaagaattaaattaatttttaaattaacaaaagcacagaaccattcccctttattgaaccactgcctttctttgaaaactggtttgataaaacggttgcagatacaaacttgaataacgctgatatcacaacgagtatatcgttctactaaataaaaaaagataagcggcccgctcatttagtatatcgttctaccaagttcacagttactatactccttctttttatatgtgtcaaaccgatgaacttttatttttcacttttttaaatcaaaaaaagacccgccgtttttcggcaggtctgacatgggtttattttctgagagaggcgagctcctcggcaatggcctgcatttcactcgggctgaatgatgcttttttcatgaccatttgatgaaggtatgtaagatcttctattttttcatcactgaaatcttccgctctgatgacgccgacattgagcatgttgagcttttgcgaaatgtcttcaatcattttgtttaacgtttctgtttgttggctcggcaaattcatgcatcctttcatgaccgttttcgtaccctttattctaacagaattcatttagaataaaagcttatttccacagcagcagaaaagttgctaagatgatgataaggtttttgatcctcaaaatgcggggaaagaatagggaggttatcgatatgatacatgtgctgtttgtctgtctgggaaatatttgccggtcgcctatggcagaggcggtattttctgatatggtgaagaaaaacgggctgaacgggcagattaacattgattcagcgggaatcggcgcctggcatgcgggaaatccgccgcatgaagggacaaaggagatcctaaagaagaaagggatcagcgcaagcggcatcacggcgaggcaggtgcgtgagtctgatctgaccgattttgattacgtcattgcgatggatgcagaaaatatcggacatctgcgcagcatggccggttataaaaaagcggcgccgcgtattgcaaggctgcttgattatgtaccggagtcggaccttgcggacgtgcccgatccgtattataccgggaatttcagcgaggtgtacgctttggtcgagtccgggtgccgtcatttgctggagacaataaagaaagaccatcatttataagggggattgaccgatgaagcagacacgcatcatggcaaaagcgattctgatcggcgctgccgccggcggagcactgtccttattacataagccgacaagagaggcatgtttccggaacatggacgcgtgcaggcagcgtgcggcattctaccgaaaacatcctgaagtgctgaaacagcaggcatctgcaaaacttgatcaagtgaagaccatcgccaataccgtatcggatgatctgagttttttaaacggccagatcactaagctgaagcagacgacaccgcaggtcattgacctgttaaaagaaacgaaggagcatttttcgaaaaacgatcattgaggtgggatgtcatgagttttataaaggagctgtttgcaaggttttctctccatgaaggacaaagtaaatcggcggagctggcgtattttttcctgctgtcattgtttccgttaatgattttcatgctgacgctcaccgcctatcttcccatatcggcagaagacgtgctcggggcggtcgatcaatacgcgcccgacagcgccatgtctatggtgaaatccataacggagcaaacgctgaacaagcgcagcggcgggcttttgtcattcgggattatcgccgtcatctggtcggcttcgaatggtatgaacgcgattgtcagagcatttaaccatgcctacgaagtcgaggaaaaccgctcatttatcatcattcgcctgacctcaatttttttaaccatcgcgatggtggttacgattttaatcgcattgcttctgccggtgttcggcagagaaatcggaatgctggccgcagatttcatcggcgcctccggcctgtttttgcaggtgtggtcggttgtccgctggggtatcagtccgcttatccttttaatcgtgtttaccgcgctttacattttcgcgccgaataaaaggctttccctccgttttgtgctgccgggagccgtatttgcggcagccggctggattatcgtcagtatgctgttctcattttacgttggcacctttgccaactacagcgccacatacgggagcatcgggggaattatcgtccttatgatctggttttatcttacgggaacactgctgattttaggaggagaaatcaacgcgcttttacataaacgtaaaaagcttcctgatgaaaatccgtaccgcgggagcaagctatagaggaacggatgacgttcaagctgaaaaacggagggaatcggctatgaccaagcatacgaaaaaaggcggaagccataataaacaaaactcaaaaaacggcccgaagaagaaaacaagcggaagcgctaacgggcagaacggataccattagaaagaagccgcctgacttagatcaggcggcttttttatgaggccggaaaagaatgggattcggatgcggggctgtgctttgttttcccgaagacgagcgcaagccaaatacagaccagaatcaccgtaataaagtaaaacaaattggcgctttcaaaccgctgcatataccagccgcccgccaccgggccgatcatgctgccgaggctgaaggaaatgccgcagagcagattgcccgccggcagcagatgggacggcagcaggtcgctcatatagctgatgccgagggaaaacatactgccgaccgccattcccgccgtgaaaaagcagcagccgatgacagaaggcgacggaaacagtccggccgtcaaaaagcaaagggcacccgttaataagatgacgagcaggacacgttttctcccgaatcgatcgcttaataaaccgagagggaactggaatacaatacttccgatggcaaaagcgggcaatatcagcgcgacggcatcgacggatatgcctaagcgcagggcgtacacaggaaagcttccgttcagcgccgtttctaaaaaaccgtacccgaaagccgggagaaaagcgacccagccgaaaagaagggcgcggtaaaaacgttttgcgctgttgtccccggatgtttcatccggaccttgcgccgggtactcgttacgtaagacaaatacaaacagccaggcggcaagactgatacagccggatacgataaacggaagggacggacttgttttcacaagagggaccatgaacgggccgacagcgaatccaagcccgaaggacagtccgtacagcgaaatgtttcttcctctgtttcggggcgttgactttgacgtcacccacgtttgggttgaaaaatgcagcatatgatccccgattccgataagcagccgaagaaaaaaccataaccatatggattgaagccaaataaaactgaataagctgatgataacaagaaatccgcccatgaccatcagaggtttgaatccgagcttgcgcaacggggcctccataaacggcgacgccagaagcacgccgatataaaggccggttgcgtgaagtccgtttatagcggctgattccccgttcgtttcaaaaatgacggagatcaccggcagaagcatgccttgggaaaatccggagatggaaacaagcagaaccaaaataaagaagtacagtcgtgacatcgcgtatttctccttcttcagtatctttcttgatcgtacacggatttgctgcgtccggcaacctgaaaatgccaattcgggctgccgcggaagtgtaattgagggagtttttgagaaggatataagaagactcattcgaaaaaaggagccaggcagatatgaatcggatttttttctttacggctgcggcgggagtgccgctttcagtcatcggcggcctgatgcactggccgtcagcggttttgtttattatttattgcttgacgattattgcgcttgcaagttatatggggagagcgactgaatctcttgccattatcgcgggaccgcggatcggcggtctgctgaatgccacgttcggcaatgcggtagagctgattatatcgcttttcgccttaaaagaagggctgacgggcatcgtgcttgcttcactgaccggttcggtgctcggcaatcttctgctcgtcgcgggactgtcgttttttatcggcggtttgaaatacaagcggcaggaattcaatattcatgatgcccggcataattctggcctgctgatttttgccattatcgttgcttttgtcattcccgaagtgttttccatggatatgggggaaaaaaacaagcttgatttgagtgtcggcatcagcatcatcatgatccttttgtacgtggcagctctttatttcaagctcgtcacccaccgcggtgtttatcagccgaatcagccggaggcaaaggaagaagaggagcagcctgagtggtcggggaaaagagcgacagccgtcttatttatttcaaccattatcgtcgcctacatatctgaaaaccttgtccatacgtttcatgcggtggctgaacagttcggctggagcgagctgtttatcggagtgattatcgtcgcaatcgtcggaaatgccgcagagcatgcgtcggcgattattatggcgtacaaagacaagatggatgtcgccgttgaaatcgcggtaggctcgactttgcagatcgccatgtttgtggctccggttcttgtgatctgttccatcttttttccggtcaatatgccgcttgtattcacattgcccgagcttgtcgcgatgatctcatccgtccttttgatgacgatgatttcaaatgacggtgattcgaactggtttgaaggggctacgctccttgccgcttatgtcattatggcgatcggttttttcctgctttaacctgtaaaaaatgcggataacaacgattgcggaggaaaagactaaaggaaaatgctatagaaagagtgatatgatgagaaagctgtttcatgccacactgattctgctgttatcctttagttttttcgcaacgccgtctgccgctgcaaaaaaaccgtttaaagttcccaactctgtcgtaagcatttcaaaggaaaatacgtatccgaatgcttcacaggaccagccgatgcttcagccgagcaaactggcgaaggaattgttagatacatcagagatcaacatcgaaaatccgcatctgataaagatgctgaatgaatcctcggtttccggttcaccgcttgccatcggataccgggcgacaatatttctcgggaaatgggcgctcggctatcagtcgaacgaaacggtcgccaactgggaatataaaaaaatcaacacaaacagagcggataaccggggcggacagcaaaccgcggttatctcatacgcccaagaacagcaatacaaaatcaaaggcgggctcacagcgaaggtgccgaacacagaagacgtaaaaagcatgatgatgcaaaaagcgatgaagaaaacaaaactgccgctcgcgtttgaaacggttatcggcgcaggcacaaaacgcgatcaaacctacaaaatttctccgcagcggctcggctacctgcacgcctacgctccggccgttaatgaaaaaggaaaagtaacatacggtgaagtgtatttggtgctgaaaggcagcaagcggaaacttgtcgtcaaaaatgtgacttcgcaaggaatcggagcttggattccggtgcaggatcacgtcacattcggttttcaaatgacagcgcagccgagataaataaaaaaagctgattccggttcgggaatcagcttttttgtgtgtgatacatttcctcgagcaattgcacattgttgttgtacagctcccgggcaagaacgcgtctcaccgcaaggctcgccgagaagtattctgtgtcttgaaccatgccttttactgtaaattcaatgcctctggttaatttgttcagactcataattccatgcacttgaaacggctccgtcgcattgagaaattcatcccgcttcagtgaatcgcgaagctcatcattgagcatatcgcaggctttttctaagacggcatatacccgctcgggatcttccttgtaactgatcacgacggactcggtaatccgcataaaatcaatgttatagttttgaagctgtctgacctcaccgttagatatggtaagcagcttgccggtccactcacggatctggagggaacggagtccgatttcttcgactgtgccgttgaacagattgttaatcgtcacataatcacctttatgaagctggcgttcgtatattaaaaagacaccggccaatatgtccttgattaacgactgggcgccaaaaccgatgacgataccggcaacacccgccccggctaaaattcggccgaaatcatgaacgaataaagaaatgacgtaaaagataaaaccgatcgtcgccgtatactgggtgatggatcggacgaggctttcaatcgtcttccctttccgttcctccaagaaatccgtgcgtttaaataacacctggacaaagcggttgatcagaaaaacaccgacgtaaagcacgagagcgacgatgatgatctcaaccactttgcttttcaaaatgtccgtaattgtcgtttccatcttttgttaacctctggcttttcgtaatgaaaaatctgtgtcctgataataactgtttttgacaaggacgttcgggccgaggcaccggacgtttgtgcagcggcagttcagctctttgctcagcttcgtctgtctccacttgtcatatgcttcaggaaggctgtctgttttaatattgccgagcggcggtgtatcgccgaaatccgtgacaatgatatttccgtcaaaaatgttgacattcaggcgggagcggccgtcagggtcgtttcgcaccgtaacgtttttcgcttcccgcaggcggaggaggagcttctgatcttcttcatcagggctgcatgcgtaaaacgggagcgtaccgaacagcatccatgtctcttcatcgcgaatgtcgagcagatgatgaatggcctgtctcatgtccgtcaggctgagtgattcaagcgcgctggcgaaatcactcggatacatcggatggacttcgtgccgctggcatttcatttcttccgtaatttgccggtgaatatgttcaatatgcggcagcgtccgtttgttcagcatcgtttccgctgaaaccattacgcctgcttcgaccagcgtgcggctgttttcaatcattttgtcgaaatagcgcgcccgctgttcaaatgtcggtttcttctccatcatcgcaaatccgatgtcggcaaagtcctcgaccgttccccaattgtgagaaatgtgaagaacgtccagatagggaataatccgttcgtagcgcccgatatcaagcgtcaggtttgaattgatctgtgtgcgcacgccgcgttcatgggcatatttcaaaagcgggacgacgtattcctttaccgatttcagcgaaagcatcggttcgccgcccgtaatgctgatagagcgtaacagaggaatttcatcaagccgctttaataaaaggtcgatcggcagcgcattcgggtctttcggctggagcgtgtacccgacggcgcagtgctcgcatctcatattgcacaaagtcgtcgttgtgaattcaacgttcgtcagtttcatatctccatactggtcgacatccatgtacgcttcccaaggatcgtactccggtgtgatcggacgcagtgttgtgttttgtgtcatgactatctaactcctttataaatggggcatactaacgtctgccaactgttaattttagacctgatctgccaagatcgcaagtagcggaaccattgaaaaacggcaaaaaatacgctaccattataaaaaatgaatggagtggaagtatggggaatgcagtaaacagcaaagatcagcagctcgattacctgaagaacagactcgatatgtttatgaatgtcattgattcattagaccctgaatcaacggacgttgaagatatagaccggctcatcggcatgcttgatgatctggaagcaaaatacgaacgctttaaaaaggattgggaataaaccccggcggatgccggggtttttctttttccataatgcggctgtataaaagggcagagcctactgcaaaataaggaaaaatgcagaaggagtgctggtcatgaaatggttttgttcaatttgctgcatggccgttttacttgcggggggcatcaacagcgcagaagccgtgccgaatgaacggataaactggggatttaaacgcagcgtcaatcatcagccgccggatgccggcagacagctggacaatctggtcaaaaaatatgatgccttttatttgggcaatacgaaagaaaagaccatctatttaacgtttgataatggatatgaaaacgggtacaccccgaaagtgcttgatgtgttaaaaaaacatcacgtcacgggcactttttttgtcacgggtcattttgtgaaagagcagcctgatttgattaaacggatgtcaaaggaaggccatatcattggcaatcattcttttcatcatcctgatctgacgacaaaaacgggcgatcagattcaagacgaactcgattccgtcacggaagctgtgtacaacattaccggaaagcgggacaacctgtatctccgtccgccgcgcggcgtattcagcgaatatgtcctgaaagaaacgaagcgcctcggctaccaaaccgttttctggtccgtcgcatttgtcgactggaaggttaacgagcaaaaagggaaacaatacgcctatgatcacatgataaagcaggctcatcccggcgcgatctaccttctccacaccgtttcaaaggacaattcagaagctctggacgatgccattaccgatttgaaaaaagaaggctacacgtttaaaagcattgatgacctgatgtttgagaaagaaatgaagctgccgcgcctgtagaaaacacctctcctggtaatggagaggtgttattttgttattttaagcttttaatcagtgcagcccaatccagatccccgaagccttgtgcgatcccgctttcaaaatggctcttggccagttcggcaagagggagttttgcagaaacctgttctgcggcggcgagcgccagattggtatccttcagccctaaagacattttgaaaccggccggctcaaatttctgctcagccatgatcgtgccgtaattttgatagacgggagagccaaagagcgcgccagcgatttctaaaaattgtttttgctctaacccgtacttctccatcattaagaatgattcagataacgcctccagcatagaaacgagcaagaaattgatgctgattttcgcggcattggccgtttttgtttcttcaccagtgtcaaatacttgctgactcaggatgttaagcagcggttcggcctttttcttcgcttctgccggtccggctgtgatgatgcgaagctcggccttctcggcggcatcggggcggccgaggacgggagcggcaataaaggactgccctctgcccgaatgtgcggcggaaagctgttctgacagcgccgtactgatcgtgctcattgaaatatgaatgccgttttcagataacccggcaataatgccgcaagctccgaaagtcacgtctgttacggcgtcatcgtctgacagcatggacagcacgatgtcggcatgttcagctgcctggcggggcgtttcggcatatccggcccctttttccagcaggtcagccgctttttctttcgtccggttatatacagtcaggctgtatccggctttcatgatattttcggcgatggggcggcccatattgccgagtccgacgatggcgatcttcatttcacagtccctccaatgaaaagttttccaccattatacatgcaaaatggttaatctgctgtgtacaggattgccactttcagttcaggttctgaagaccatccggagtctgaggcggctttccccttataaaatccggtaaatcgggttttgatgattgtttttgaacggggttttacagtgaacgtttttgatttgaatgtgacgtcctttatgttttctgataaatccggggtgacagaaatggtttgttccccttttccgtaatgattgatataaagcgtgcagctcatgcccgctctttttcgctcaaccagatgactgcattcgctgcggtgcttcaaatactcgacagcctctttttcgggcgcgaactgttttaaggaaaaaacggcatattcggtggcaggactgataccggaagcggcccccatactgagaaagatcagaaacagccccgccgcgggaagcgtccgcctgaacgcggcggcacaccagattaacgccgcaaagtaaagcacgaccccgggaatgacggagatatgggctccatcttccggccaagaggaaaagccgagtaactcaaagatgtaatcagacaccgtacggccgttatacagcggggcaatggacatgacactgaaagccaggaggacagaagaaatgattttgtgagaaaggatggtaacggcgcacacctctttacgtttttttccagactatcatgttttctcaaaaaaaagaacagccggcagccgttcttacttgaaaatattaaaccagcctttgcgggcgaaccaaaacagcatggcggccacaagaacggccattacgcccaaaacgataaaatacccgtatttccaatgaagctcaggcatgttatcgaaattcatgccgtaaacccctgcgatgaacgtcagcgggataaaaatggtcgagacgatggttaatgtcatcataatggcgttcatccggtttgaattcagcgtcacatagctgtcccgcaaatctgacgtcatatcacggtttgactcgatcagctcagccagttttaacaggtggtcataaatatcgctgaaatacgctttcgtttcacggctttcttttacatggtcaaggctcaaaatccggtacattaaatcgcgcatcggaatgatcgtccgcctcaggttcaaaagatcagtccgcaattcaaacacttcattcattaaagtgccgtaagatttatgtgttctgctgtcctcaatttcattcagccggtcttcaattttgtacagcacggggaaatattcatcgacaagctgatccataatcatataagtgatgtgcccaggcccttttttggctaatcccggagaagcgaaaaaccgttctctcacctttgagacgccgggcgattcgtgcaaatggaagctgacgatgaaacggtcggactgaaaaatgtccacctcttccatttccagtgtgtccgggttcagagcgtggagcacataaaaacggtagccgtcataatggtcgattttcggccgctgcatatgctgaaagcaatcctcgatcgcaagcggatgaaagtgaaaataatcacgcagcagctcggtttcatgcatctcagcgccgaaaaaatcaatccagtaccatgcgatgtccggttgttctgtacgtgatagggggatattatctaatatctcattatgtgttgtgattgcggttatatgtatcataaacaaccctccgcctgccattatatcatgcggcgttatgaagaaaagtatacgaattgccgcccggccgcttcatgatatacttggacaaaaaggggtggagcatatgtggaaggaaacggtttcggtcacaccgccgtatcattttgataaagtccttgaaaggctgtcgctcgatccgctgaatgcggtcgatcttcatgcaagatcaatcaaagtgccgctcagaacacgggacggcaaactgtccgtcatcacggttcaagcggaaggcaccgccgcagacccggtcttcctcgtcagcggagaaacggaccgcgaggagatgattgaacggatcaaacacatttttcagtgggagcagccgcttcagcctgtgcttgatcatttctcaaaaacaaatctgtcggcgctttttgaggagcatgcgggaaccccgctcgtcttggaatatgacgtctacaactgtctcatgaaatgcatcatccaccagcagctcaacctgtccttcgcttttactttaacggaacggttcgtccatgccttcggtgaacaaaaagacggcgtctggtgctatcccgagccgaaaacgatcgcggggcttgagtatcaggacttgcgggagctccagttcagcatgagaaaagcggaatatgcgattgacatttcacggatgattgcagaaggagcgctcaatctggcggaacttacccatttgtcggatgaagacattatgaaaaagctgatcaccatcagaggcatcggcccgtggaccgtccaaaacgtcctcatgttcggcctcggccgcccgaatctgtttcctttggcggatatcggcctgcaaaacgccgtcaaacgccgcttcgccctagaggataaaccgtcaaaagacgtgatgctccaggtaagcagcgaatgggcgccgtatttaagctatgcgtccttgtacttgtggagaagtattgaatgatgaggatttttggaaacttccagtgaaaaacatgaaggaaccgccggctgcatgttatactgaaaagatgtgatatttcaaagcagccgttttcccaggagaaaggctttatatagaaacggagagaaaaaaacgtgaatcaacatcaaaaaaaggcgcctgccgaattgaaaatcggacagacatttccgctgaccatcaaacgtctcggcattaacggagagggcgtcggctattttaagaaaaaagttgtcttcgttcccggcgctctgcccggtgaagaagtcgttgccgaagcgacaaatgtgcagccgaaattttcagaagcacgcgtcaaaaaaatccgcaagccgtctgaacaccgcgtcacgccgccatgcccggtctacgaccagtgcggcggctgtcagcttcagcatctggcatacacccagcagcttcgcgaaaaacgcgacatcgtcattcagtctctggaacgtcatacgaaattcaatgtcgaagaaatgaacattaaagatacgatcggaatggacaacccttggaattaccggaacaaaagccagtttcaagtcggacgctcgcaaagcggcagcatcattgccggcttatacggacttgattcccataaaatcgttccgattaaggaatgcattgtccagcatccggcgacaaacaaaacaacgggtatcgtccgccgtattttggaaaaacacaacgtatccgtttataacgaacggaccaaaaaaggcgatgtccgcaccatcgtgacgagagtcggttttgaaacaggcgaagtgcaggtcgtgcttgtcaccgcgaaagagacactgccgaataaagacgaaatcgtcaaagccattcagaaccgtctgccggaagtgaaatcgattattcaaaacgtcaacggcgcgcgcacatccgtcattttcggtgacaaaacaaaagcgctggccggaagccatgccattcaagaagtgctcggcgacgtgtcatttgaactgagcgcccgcgccttcttccagctcaaccctgagcagacggtcaagctgtatgacgaagtgaaacaagcggctcagctgacaggaaaagaaaaagtcgtagacgcgtattgcggcgtcggtacgatcggcatgtgggtctcaagcggcgcaaaagagatccgcggcatggacgtcattaaagaatcaattgacgatgcgaagaaaaacgccaaaaaacacggcatcaaaaacgcggcatatgtcacaggaacagccgaacactggctcccgaaatggacgaaagaaggcttccgtcctgacgtggtcatcgtcgacccgccgagaaccggctgtgacagaacatttttagataccatcaaaaaagtaaaaccgaaacgcttcgtctacgtatcctgcaatccttccacactggcgaaagacttgcagacgctgtcgaaggactatcgcgtcgaatatattcagcctgttgatatgtttccgcagacggctcatgtggaagccgtggcgaagcttgtattaaaatcgtctaactaaaataaacaattcgtaatcagacctggatttcggtaaattaaacaattccgatttccgggttttttcatgttttgcccttgtcctatctgtcttttgtctttatttaactgataaaaagagttgaaaaaaacgtatggaaaagcaagtggaaaacagccaagtaggctgctttctattaacactttctttttttcgtttggaaacggcattacagacaaaatatgaagatattgttgtgaaccagaagcaataacaagtcgtccaagttccgtgaatacttgtaatttcagttaatattttgtaaacttctttcttaaagaataaagtccccgacactcatcggcacatctactattggcgatagttgtaataaatgataaaaaggaggtgaaaccgaatgagagatattggaacctcaaccactgaacgaaggttctgaagcagaagctgtaaaaggcaaggttgcttacttacactaatcacaacggcagttggcacatctactattagcaacaactgtggataaaagatcaaacacactaaaaaagcatgtttggtcgttatacatgatatgaaagcctaaacaggaaaaaaggaccccgattattttccttattcccaaagaagaaataaatccgaggcggaaacgcaagtgataacaactattacagtaatacctgcgatggttatatccttaataagtaattatcgcgacaatcatgcttcatcatataatgatgttagattgacacttggctaaaaagtattgcagaaaaggaaatggataatgaaatggataaagtaaacaaaaaacgaccgttgtataaaaaaagttggtttctcacggttttggcatttttagtttcacagctttattttaattttgcagaattaacgggatggggtcctaattatagagaaatgaatggattcccagcaaacatagctgaactggatttctttcaaacatatctttcattctatgataatccatggtttaatattgtcactgttttcttgggggtttttactgttatacacataatcataggtataacaaaggatattcgaaatgaaagcaataacttctgatgccttatttaatgatgaaagaaaatgaacactttcttattaatcttatgaatgagactgcgacacttagtcagcagtctattttattggttttggatcaggattaccgaatcgtaaccttatacaaacttttataggtaattgtataaagatattaacatatggccctctttactccatgtgattcacaagcggtaagttaaggctttttctttttacattctcttcagtactcagatataccacccccagccccatttgcttaatcaaatgattttttcgcaaaatgatattgagatacggatatggtgcacgttaaatattttatcttcgataacaggacaattattttgcattggtaatagggagaactcatatgatattctatttaggttggaatccttttgtccaaaaagagcaaaagtaaggccgcctaagaaaaatgaaggtcagcgctactattaataaaccacaatataaataaaaaataggtgtagataatcatcacacttttctctctcaaacccttttaaaggttaaggagttggctgagttgatcagaaatgagcgatatggggttaactatagcgatagtctattacgttaactcaattaaggcgttctgcttcagtttgcttttcactttttcacgtgtaaaaagtgaaatgttcaaaatttactatcgtttgataagaagtgctgacacatgctataagtgtaaaagaagcatggtcagtttttaattttgggataaaggtttggctgtatcccatcatgaaaggatttggatttgttatgacagataatttctggcgtgaattaccgcggccattttttgtactggcaccaatggaagatgtgacggatgtcgtttttcgccatgttgtgagtgaagcaggcagacctgatgtgtttttcacagagtttacaaactcagaaagctattgtcacccggatgggaaggatagtgtgcgcggccgtttgactttcacggaggatgaacagccgatggttgcccacatatggggagataagcctgaaaactttcgccaaatgagtattgggatggcggaattagggtttaagggcctggatatcaatatgggctgtcctgtacctaatgtggcggggaatggaaagggaagcggcctgatttgccgtcctgaagttgcagccgaattaatacaggcggcgaaagcaggaggtctgccggtaagtgtgaagaccagacttggctacacggatatagacgaatggcgcggctggctgacacacatactgaaacaagacattgcgaatctttccattcatctgcgtacaagagcggaaatgagtaaagtagatgcgcattgggagctcatcccggaaatcaagaaacttcgtgatgagatagcgccggataccctattgacgatcaatggggatattcctgaccgtgaaaccggcttgaaactcgctgaacaatacggtgttgacgggattatgattggacgaggcatttttactaatccattcgcctttgaaaaggagccgagagagcatagcagtaaggaattgcttgatcttttgagattgcacctggatcttcatgatgaatattcaaaagcagatgctcgagcatataaaccgctccctcgctttttcaagatatatctccgcggattccgtggagcaagtgaattaagaaatcaatgcatgaatacaaagtcaacagatgaagtgcgtgcattgctcgatgactttgagagaaagtatcttgataagatggagcaagagtgacctaaacaactcttcatccggcccggatttcggtttgaattccgggtctttttgtgtgcagtttttatccagacagatccatggccagtttcgtcatgcagaaataaacgaatcatggtacattgataggacatacatcataaaggggagagaaaaatgaaacgactgtgcatcatcccctgcggcaagaaaaaaatttgggatgtccattcagatacaggtccggtaagggcggaagacgcttatctcagcccgtttcatcaggcgtgcgagcgatatgcgaaagcatttttcgatgagtgggtgattttgtcggcgaagcacggattccttcgtccggatgatatggttcccggaaattacgatgtcacttttggaaccggtcatccggagatcatggcagcggacgagctgcgccgtcaatttcatgaacaaggcttttccgacatcgaagagcttgtcatgcttggcgggaaaaaataccgaagcgtcctaaacgccgtcatcggagagcatcagcatatcacctggcctttgtcatcgtataaaggcattggctacatgcttcaagcgctgaatcgggctgttgaagaaaagcatgaactgcagcacgtggatatgaaaaaaagagtgtaaccactcaatcgccacgatagactgtatgcagaagaatgaagcaataaaagatttccgaggaaataaatacgtcgatcattgtcaaagacagggtgatgcccggtcttttttgtatgccataaaacgagacaaagggaacagatcgagacaaaatgagacacctgtctcaaactgtctccattgtaaaaataaaaacattcattttacgggcttcaaaggctggcatgcttcttgcatttataagtgtgaaccctaaatagaaggaggcgcacaaaatggaattgttaaaacgagaaggcttgtcattaactgaggagaaagcgctgtggatgtaccaaaagatgctggaaatcaggggctttgaagacaaagtgcatgaactgttcgcgcaaggagtgcttcccggattcgtccatttgtatgccggtgaagaagcggtagctgcgggggtgtgcgctcatttagatgatggcgacagcattacaagcacacacaggggacatggccattgtatcgccaaaggctgtgatctggacggcatgatggcggaaatattcggaaaagcgaccggactgtgtaaaggcaaaggcggttctatgcacattgcggatcttgataaaggcatgttaggcgcaaatggaatcgtggggggcggattcacgctcgcatgcggatcagcgctcacggctaaatataaacaaactaaaaatgtaagcgtttgcttttttggggacggagccaataaccaagggaccttccatgaagggctgaacttagcggcagtatggaatcttcctgtcgtgttcatcgccgaaaacaacggttacggcgaagccacgacatttgagtacgcatcagcctgtgattcaatcgccgatcgggcggctgcctacaacatgccgggggtcacggtggacggaaaagatattttagcagtttatcaggcagccggggaagcgatagaaagagcaagaaacggcggaggcccgtctttgattgaatgtatgacttacagaaactacggccatttcgaaggggatgcccaaacttataaaacaaaggatgaaaagactgagcatcttgaagaaaaggatgccatccaaggctttaaaaactatcttctaaaagaaacagatgcaaataaactgtcagacatcgaacagcgtgtcagcgaatcgattgaaaaagccgtctcgttcagcgaaaagagtccatatccgaaagagtctgagctgttgacagacgtctacgtgtcatatgaaaaagggggaatgtgagatggcgagagtcataagcatgtcggacgcgatcaatgaagcaatgaagcttgcgatgagaaaagacgaaaatgtgcttttgatcggtgaagatgtcgccgggggagcggcggtcgatcacttgcaagatgatgaagcatggggcggtgtattgggggtcacaaaggggctcgtacaggaattcggcagaagcagggtgctggacacaccaatttctgaggctggctacatgggtgcggccatggctgcggcatccacggggctgagaccgattgcggaactgatgtttaacgattttatcggaacgtgctttgaccaagtgatcaaccaaggggcgaaattccgctatatgttcggcggtaaagcgcaagtgccgatcaccgtccgcaccacatacggagccgggttccgggcagccgctcagcattcgcaggcgctgtatggcctgttcaccagcatcccgggtctgaagacgattgtgccgtccaatccatatgacgccaaaggtttgctgctttcggcaatagaagacaatgatccggtattcttttttgaagataaaacgtcctacaacatgaagggcgaggtgccggaagattattatacaattccgctcggaaaagcggatatcaaacgcgaaggcaacgacataacactgtttgcggtcggcaagcaggtcaatactgcgcttgaagcggctgcgcagctttctgagaaaggcatcgacgccgaggtgcttgatccccggagtctgtctcctttagatgaggaagcgattttcacatcgttagaaaaaacaaaccggctgatcatcattgacgaagccaatccgcgctgcagcatcgccacggatattgctgcgattgtcgccgataagggctttgatttgcttgatgcgccgattaaacggattacagcgccgcatacaccagtgccgttttcgccggtgcttgaagatcaatatttgccgacaccagaccaaattgtcagcgtcacgcttgaattgcttggcgagccggcaatgaattaaaggagggatatagaatggctgtaaaagtagtaatgccgaagctgggaatggcgatgaagaaaggtgaagtatccgtctggaataaaaaagtcggcgacccggttgaaaagggagaaagcatcgccagcatcaactcggaaaaaatagaaatggaaatagaagcgcctgaaagcggcacgcttctccatattaaagtcaaagagggagaaggagtcccgccgggaacgcccatctgttatatcggggaaaacggcgaagaagtgcgggagaaggaggcgccggctcctgaaaatgcagggaaaccgcaatctgaacctgaacatattcccgctcccaaagccgtgcaaaagcgtaaacaccgcgtgaaaatatctcccgttgcccgaaaaatggcggagaaagccgggttgaaagttgatacgctgaacgggacggggcccggaggcagaatcgtaaaagctgacgtcatcaaggccatgaagacggaatctgaaccgcagtcttcggttcagacggcacagccggaggaaaaaccggcttcagcgatgagaaaagtaattgcagaccgaatgcacaaaagcctgcaaaacagcgcccagctgacgctgacgatgaaagcgaacattacggagcttgtaaaatggcagcagcagctcgccgacagcgcgaaaaagcggagcggtgttaaactgacggtcacacatttcgtatcccgggccgcggtgcttgcgctgaaacagcatcctgagctgaacagctcttatcaagaggagcggatcatcacctatccatatgtccacctcgggatggcggtttctcttgaaaacggtctcgtcgtgccggtgattcgggatgcggaaaagctttcattccttgagcttgcggatcacatcagcacatcggcacgccgggcgcgggaaggcaatgcttccggagatgatctgcacggatcgacattttctattacaaatctcgggggttacggaattgagcatttcaccccgattcttaatccgcctgaagccggtattctcggagtgggcgcaagctatgaaacgcctgcgtttaaaggagatgagcttgtcaaaagcatcatgctgccgctgagccttacctttgaccacagagtatgtgacggcgcaccggctgcggacttcctgaaaacggtcaaagcgctgcttgaagagccggccggattgattttatagagagggtgaagagattgacactagccattatcggcggcgggcctgccggatatgcagctgccgtgactgccgcgcggaggggagaagaagtcgttctgatcgacaaagggccgctcggaggcacttgtctcaatgagggatgcatcccgacaaagtcgcttttggaaagcgcgaatgtactcgataaaatcaggcacgcagatacattcggcatcgaactgccgcaaaacattacactcaattgggcccgcatgcaggggcgcaaacggcaaatcgtcagccagctcgtgcagggaattcaatacttaatgaaagcaaatcagattaaagtcatcagcgggacagcctcatttctcacagagcagacattgcttgttgaaggagaaggaggcgcaaaagacattctggaagcggatcggatattgattgcatccggatctgaaccggcggagctgccgtttgccccatttgacggcgattgggtgatcgacagcaaagacgcgctttctttacagcaaattccttcttctctgcttattgtcgggggaggtgtgatcggctgtgaatttgcctctttattcagccggtttaaaacgaaagtgacggtgattgaatcggctgaccggctgctcccggcagaagacggagaaatcgccgccgttttcgaagactctttaagagacagcggggctgatattcagacgaaagccgcccttcagcggattgacaaagaaaggaaaaccgcggtgtggacaaaagacggcaaagaaattgaggctcaggctgatcacgttttggttgcaattgggagaaagccgcgtttgcatggcttgaatctggagcaggccggcatccggtattctccgcgcggcattgaagtcaatgaccatatgcagaccaatgtgcctcatatatatgcgtgcggcgatgcggccggaggaatgcagctcgcgcatgccgccattcatgaaggaatcacagccgccgcgcatgcctcgggaaaggacagcaaagtcaatatgcgggcggtgccccgctgtatttatacatcgccggaaatggccgctgtcgggctgacggaaacacaggcgagagaggcatacggagatgtgaaaatcggagaatgctcattttctgctaacggaaaagcgttaattaaacatcagcatggcggcaaaatgaaaatcattgccgaaccggaattcggagaaatcgtcggcgtgtcaatgatcgggccggacgtgacggaattgatcggtcaggcggtcatgatgatgaacggtgaaatgacggctgatatgtcggagcactttatcgcggcgcatccgactctgtcagaaacgcttcaggaagccctgctgaatgtcaccggacttgcggtgcattccgtataaccggaataccctttctcagatgagaaggggtatttttcgttgaaagcgctttatttttcccctacaatatatgaaaagatggtctgaacaggggggagcgaatacaatgaatgtcattcggaatgattttaaaacctggaagcgctttgtgaaagaaggcgtgcttgatgaatcccgtattcagaagcgggtggccgcctcatggcaccgctgcaaaaaagccgacgttaacccttatctcgaaaaggggccgaatgtaatgccggcagatcatttagaaagacaggccgaaaagcatgcgttatttttagcggcctcaacgccgtatgcagaaagaatgaaaacggcgatgcgggaaatggaaatgatggttctcctgattgattcagacggcgttgtccattcagttgacggccacccgcgcaccattcatgaagcgaaccgcatcaatttcttaaaaggcgcccgctggacggaaacagccgtcggcacgaatgcgatcgggacggctctttatacaaatgagccggtcatgatacacggttctgaacattattcgctcgcttctcatcaatggagctgttccgccgcgccgatccgttatgaagacgggcggctggcgggtgtcattgatatttcttgccccgccgcccgcgctcagccgtttatgctcggaattgcctcctccatcgcttatacggcggaacgggagcttgccctaaagatcaaaatgacagaacttgacatgatcagcaagttcgccgggcttacccggtctcacgatccgatcgtgctttgcaatgaaatgagccgggttatcgccgcaagccgtcccgttcagcattttaccggacatatgctgcgcgagcttgaggaacatggctatcacatcaagcaggcgaagcgggaggagaacggcttctcgtgcatttacttatccaaacgagaagaaaagccgtcttttatattccatggtgcggcaggcaaaagcccgtcatcccgacatatgcttcagcagctggagcttgtcgcccgcacggacgcaaccgtttgtcttacgggagaaaccgggacgggaaaggaggttgccgcccgggcgattcataacaacagctccaggaaaaacggcccgtttatcgccgtcaattgcggagcggtccccgaaaagctgattgaaagcgaactgttcggctactcggaaggcgccttcaccggggccaaacggaaaggacataacggcgctttgcaaaaagccgataaaggcacgcttttcctcgatgaaatcggagaaatagcacactccatgcaggtcgctctgttacgggtgctgcaggaacggaaagtcaccccggtcggcgggacaaaagagattcccgttgacatcagaatcatcactgccacccacactgatctgagacagcttgtcgagtgcaaaaagctgagagaagatttattttaccggcttcacgtctgtccgatccacctccctccattaagagaacgcaccgaagacattcccggcctcttccttgaatttcagcgaaatcgcggctggcgcggggagcttcctgatgactttttagacctattaaagagccggaaatggccggggaatatcagggaattgtttaatgtatttgaacgtctttccgtcatgttcccggacggacggctgtcagaacgccccatcgcagccctgcttgaagcgtcaggtcttaaagaggcggccgagtcttatgaacaggaagaagcgccccctgtctccatccgggagcacattcagaaaaacatcatcgtaaacgcgcttgaatcggcgaaggggaatgtcacgctggccgccaaaatggccggaatcccgcggagcacgttttacaaacgtctcaaaaaattcaaactcaccgccggacaattgtaagaaacaagcatacttctcttggctgccggacacgttatgtgtgaggcctaaaggaggtttgagacgtgaatacacagcgtgcgaaagacatttcagaatccgccgccatggcgtatgtgacgtacgaaggagttccgatttatattcagcatgtcaacgaagacaaggaaacagccagaatttttccgatcggaaatccgcaatttgagcaggaagtgctgctttctgatttacaagagcatttttgagaatgggtctgctgatgacagcaggcctttttcgtacctgtgggaactttcccgctttttgagaaaaataactaaaattgattaaatgatctaactcctccaaacccggtacagatcggaccttctcatgatataaataaaatgaaaacgttatcagaggagggcttcacatgacagacaaatcattctcaatcgttattgcaggcggcggcagcacatttacccccggaattgtattaatgcttttgaatcacctggaagagtttccgatcagaaagctgaaactttatgacaatgataaagaaaggcaggagcggattgcgggtgcgtgtgaggtatttataaaagaaaaagcgccggacattgaatttctggcgactgatgacccagagacggcttttacggatgttgactttgtcatggcgcatatccgcgtcggaaaatatgcgatgcgcgcgctcgatgaacaaatcccgctgaagtacggcgtggtcggccaggaaacatgcgggccgggcggaattgcatacggcatgcgctctatcggcggtgttctggagattcttgattatatggaaacgtactcgcccgacgcatggatgctgaattactccaatccggcggcgattgtggccgaagctacacggcgcctcagaccgaattcaaaaatattgaacatctgcgacatgccggtcggaattgaggatcgcatggcgaacatcctcggattatcttcacgaaaagaaatgaacgtccgttactacggtctaaatcactttggctggtggacgtccatcacagaccggcatggcaatgatttaatgccgaagctgaaagagcatgtccgtgaatatggctacgttccgaagacggaggccgaacagactgaagcaagctggaatgacacattcaaaaaagcgcgcgacgtacaggcggctgatccggatacgcttccgaacacatatctgcaatattacttattcccggatgatatggtgaaaaaatcaaacccgaaccatacgagagccaacgaagtcatggaagggcgggaagctttcattttcagccaatgcgatatgattacgcgcgaacaatcgtcggagaacagtgaaattaaaattgatgatcatgcttcctatatcgtcgaccttgcccgggccatcgcttacaacacaggggagagaatgctgttaatcgttgaaaataacggcgcgatcgcaaactttgatccgtcagccatggttgagattccttgtctcgtaggctcaaacggaccggaaccgctctcagtcgggaacataccgcaatttcaaaaaggcctgatggaacagcaggtgtctgttgaaaaactgacggctgaagcgtgggaagagcggtcatttcaaaagctgtggcaggcgctgatcctgtcaaaaacagtgccgaacgcccgtgtggcaagactgattcttgaagatctgatggaggctaacaaggactactggcctgagcttgatgtaagtccgtctcctatttcctgatgacaatcttccccgttttctttatctgttattctatataatagaaagaaaacggggggatttttgggatgagtcttgaagaactggttaatcagcattacgcgaaattaaatgacaacgatttttatattttaaaatatatattgaatcataagcatacgtgctatcatctcggtatcaatgacatggcgaaagcctgcaatgtctctcggtcttccattctgcggctcgcccaaaaactgggcttcagcggctacagtgaattccgggtttttctgaaatgggaggatcagcctgaagagggcgagaatatgacatttgaaaagctactggatgatattgaagccaatgtaaaatatgtgaagtcaaaagatatgacggagatgtgccggctgatagatgaagcaaaacggattttcgtttacggatcggggacggctcagagggtgtgcgcccgtgagctgcagcgaatgtttgtatcccggcggaagtatctgattttaattcaggacatcacagagtttgatatcatgtgtgatgattttaaggttgatgacgtattcatcattatttctttatcaggcgaaacacccgaattaattccgcaggtaaggaccctgtccgcaaagggagttccgtttatttcaatcaccaatctgaaaaacaacgtactggcgcaaacgacgccgtataatctttatgcgaccagcaagccggtgacgttaagcgataaaacggaaatcgtcgcattcgccccgttttttctggtgggcgaagcgttattccgtgcatatgttgattataaagagctcgaaaattttgataaatagcgggaggtcacgtgaaatgatgcaaaaagtccagcgcttcggcagcgcgatgtttgtgcctgttttattatttgcattttccggtattattgtcggtctgagtacgctgtttaaaaataaaacgctgatggggccgctggctgatcctgacgggctttggtatcaatgctggtatgtcattgaacagggcggctggaccgtctttaatcaaatgccgctcctgtttgcgatcggcatacctgtcgccttagcgaaaaaagcgcaggcgcgggcctgtttggaagcgcttacagtttatctaacattcaattactttatcaatgcgattctgacggtttggggcggggcttttcatgtcgatatgactcaggaagcgggcggaacgagcgggctgacgatgatcgccgggatcaaaacgcttgatacgaatattatcggcgccatctttatttcatctattgtcgtgtatttgcacaatcgttattttgataaaaaactgccggattttctggggatttttcaaggatcttcctacatcgttatcatttctttcttcattatgataccgatttcacttgcggtggcatacgtatggccgatggttcagtccggaataggctcgctgcaaagttttctcgtttcttccggggcgatcggcgtgtggatttacacgttcctggagcggattttaattccgaccggcctgcatcattttatttactctccgtttatttacggtccggctgtggctgaaggcggtatcgtcacctattgggcccagcatctcggggaatactctcaaagcgtcaaaccgctgaaagaattgttcccgcaggggggcttcgcgcttcacggcaactcgaaaatcttcggcattccgggaatcgcgctcgctttttacgccacggcttcaaaggaaaagaaaaaaatcgtcgccggccttttgatcccggtcaccttgacgtccattgtcgcgggaattacagagccgattgaatttacattcctttttatctctccgtttttatttgcggttcatgctttgcttgccgcttccatggcaaccgtcatgtatatggccggcgtcgtcggaaatatgggaggcggtttgatcgaagctgcgaccttgaactggatcccgctggcgtcaagccacggcttgacgtatgtataccagatcattatcggattgtgttttaccgctgtttactttttcgtcttccgtttcctcattctcaaattcaacatcgccacaccgggcagagaaaaagaggaagggcaggaaacaaagctctattcgaaaaaggagtacagagaacggaagcaggcttcaaaagaaacagcggcggcagacgaaacacagcgggatacagccgctttgtatattgaagcgctgggcggaaaggacaatattacggagatcaccaactgcgccacccgtctccgcgtcactgtcgctgatgaatcaaaggtcaaaagtgacgccgatttcagagagctgggagcccacggcgtcgtcagaaaaggcagggcgcttcaggtcattgtcggattaggcgttccgcaaatgcgggagcgtgtcgagaaaatattgaacggttaaaatactgcagcagcagattatgtgcagagcgcttgttaatccggcgctctttttatgttttgaagaaatgtatgaatttgtcatacctttgccacctgtacatgcaggagtgaaaatgagagggtgcaaaaaacgaaatgacttctgcggtattttaaatagcaattaacaaataggaggcaagacaatgacaaactatacgactttcttaggactttacaaacccgataaagccgaagggattgaagttgaaagcattgctcaaaactttgaagcgattgacagcaaaatcggtgctgcgcttagcaatggcacgtcaacttatgaaaatttaaacgaaagacttaaaatgtatgaaaacagatttgaacatgtgacagagcggaacgttatggattttggagctaaaggtgacggcgtaacggatgatacgcaggcatttcatgatgccatggccgacggaggttatgtcgtaacagttcccgcgggtgtattcagaacatcgggattgtttgttccttcaaatacaatgcttgtcggagcaggcaagaaaagaacggtcattaaattattagacgaagcaccggtcggccattctgttctgaccaacagtgattatacgaacggtaatgaaaatatttatgtcggccatctcactttggattggaacaaggatacgcgtccttccggctggaagattccgaaaggtcccacttcaagctgtttgctttttgcgaatgttgactattcttttgtcgagcatgtgtttgcgaagaacgccggcctgcacggctttgattctacaagcccgaactataacagacatggagaaaaagatgatccaacttattatcagcccaacggctgtaactttgtaacgttttcacattgtgaagcaacagggtccggggatgataactttacttgtcactttgggaaacacacgactttcagtcattgcctctcttatcatcctatggggctaaacgatggaacttctaacacgaactgttttgaaattgatgacggctctcaagacgtaatgattgatagttgtatctcaattggaggagtccgaggctttgagattaaggcacacggttatgcaccggctgcgaagagagtacagcttgttaactgtcgcgcatacgaaaatgccattggatatagcattcgccatatcggtcaccacacagcaagcgatcctcagtcagcgacagcccatgatgtgcagcttgcgaattgtatcgcatataaccctaagccgaatgatctttacaaaggggcgggtccaaacgcgttgcaaatctccggatatgatggtgtgagtgttgtgaatttccatgctgtttgtgatgatagttcaattgattataagggtaattcggtagtcagcgtattttataaaggacgcttaattagcttaaagaatataaccattcgcggatttaagactgcagacaatgatttatatattgtcggcggggataactcagtagggaaagtaatggtggatggtgtcaccttgattgactccggaaaaaaaggagttgcatttggcagcggaatgtacgagtctgttgttagtaatgtttggggacagagatctccaaaaaataatagcgggacagttggaatttattcctcagatccagatcttaatgtatccaattgtgatttttcaggttatgaaactgactttaacattggaggagcagtcactccttatttcttattcaaacataaaggaagcggggtcattggctcccgtgaatctcacgctacaggcaataataattttgtggctggttctgttcggggaagagcaaccggagcggctcaatcttcagtgctttcttcgtacaatacaattaatccgaattcagattctgtagcacttggctggggtgccggcagcactccgtcatcagccaacagaaaaattgagcttcacgcaaaagaaggaacaattaaggctacgggaggtgtaacaggttcctcgacattctctgactacgccgagtattttgaaagcctgagaggggaaaagattccgacgggaacacttgtcacacttgaaggtgataagatcagaccggctgaaaaaggtgacctcatgcttggggtcatttccgagaccgccggagtgattcttggtgagtcgagttttcactggtcgggacgatacgtaaagaatgaatttggcggctatgtttatgaagaacagaaagatgcgaatggccatacggtcatggcgccaaaggaaaatccggactttcggcctgaagaagactacgcttcaagagaagagagagacgagtggaacattgtcggactcatcggccaggtatatgtcagatgcgatgagactgtgaaagcgggagattttattcacgctcataatgggattgcaacaaaatctgatgctccaaaccagcgctggcaggtcatgaaagtgatcaatgagtttgatgctgataaaggattcggggtcgctctcgtttttattcgttaaatgaaatgacacggtatgaatgatcatctgactagcggacgtcttttaaaggctccgctagtcattttaaaataaaaggctccggttcaggagctggtaaaaagaaaagataagacagtctccatatatctgcacgcctcattcccacaatttttatcctcaatgatatttccgttttttttacacaaagtacataataaaagtgcaggttcaagggttaatcctttattcatttaagacaaacaaataaaataaatatacatacatattgaacaaaggatttggaggcttacacatgtcaaaggctttatcatatgtaaaaccgtattctcttttggcgggaatcgctctgtttttcatgctcatcgagcttgcggtagagctgatacagcccctgctgatcgggaaaatcattgacgaaggaattttaaagcaggatctcggaacggtttggctgtggggcggcgtgatgatcggactgaccgctgtttcattcgcatcgggcattttaaattcattctactccgcccacatcagccagagctatgcgtatgatacgcgaaaagggctttttcaaaaaattcaatccttctcctattcgacgtttgcgcaattctcatccacatcgtttatcacccggctgacaaacgatgtgacacaggttcagaatatgcttttcatgagtctccggtttatgctccgggcgccgttaatgatcgcggggggcattattctctcgctgaccgtcaatgcgaaactcggtttttttctgctgatcacggtgccgattttgcttttgtttttgctgtgggtgctgaaaagaggcggcgcgctgtttcggtctgtgcaaaagcggcttgatcaggtcaacacgatcatgcaggaaaacctgacggcgatcaaactgattaaagcgctcctccgtgcaaaccacgaagtgaaacgttttttgaaatcgaatacgaagctgatggaaaaaacggtctccgcttttcgtctcgtggaagcggcgatgccgattttaatgctgctgatgaacatttgtattttgtttatcttatggttcggcgccaaaagcattgctcagggcggagcgcaggtcggcgatgtcgtttccgtcattaactatgcgacgcggattacaggcgcgctgtccgtccttccttttctcatcatggtattttcccgggcgaaggcttccggagaaagaatcggcgaggtgctggaaacagaaggcggcgagggaacggggcaggacccggcacgggcgcttgcaggcgggattgagtttcgcgaagtgtccttccgctatccgggcatggaaaaagacgcgctgcatcacgtgtccttttctgccagcccaaaagagacggttgccattatgggcgcgacaggctcaggaaaatcaacgctttttcagctgattccgcgcctgtacacggctgattcgggcagtattttcatagacggcaaaccgatcggtgaattctccgcttgcgggctgcgcagggaaatcggctatgttccgcaggaagtgcttctgttttcgggcaccatccgtgaaaatatcgcctgggggcgggaggatgcttcactagatgaagtaatggaagcggccaaagacgcgcaaatccatgacacgattatgaagctgtcaaacggatacgacacggtgctgggacagcggggcgtcaatttgtcaggcgggcagaagcagcggatttccatcgcgcgcgcttttatcagaaagccgtccctcctgctgttagatgacagtacgagcgcgcttgatcttcaaacggaagcgaagcttttacaagcgatcagatcctatgaatgcacgacactgattattacgcagaaaataacgactgcgatgaaggctgacaccatcttattgcttgaagacggagaactgctggccaaaggcacgcacaaagagctgatggcacagtctcatctgtaccggcagatttatgaatcacaattcggaaaggagggagctgacaatgcaaaaagacattcgtaaacctttccgatatccaaaaataccgctcaaatcgaatgaaggcggcagaaaacgcgcgaaagcaaaagatacaaaaggcacgctgcgcagaatctggtcttatgtagccgagaaaaaagggcttttaacccttgtgatcatcatggtagtcataagcgccatattcggcctgctcggaccgttcgtcatcgggaaagcgattgatcattttatcgtcggacagacgacagacggattggcgggggtgctgttcatcctgtttgggatttacctcgtgcaatcattgtccttatggtttcaaaactattggatgatcaatatctcgcaaagcaccgtgtttaaaatgcggagcgagctgtttacccatctgcatgagctgccgattccgttttttgataaacagcggctcggggacttaatgagccgggtcaccaatgatatcgaaaatgtcagctccactttaaatacatccgtcattcaagtgctgtcgagcgtcattacattcgtcggcacaatctccgtcatgctgtacatgagtccgcttttaacattgatcacgcttttgattattccgatcatgcttttgagcattaaatggatcaccaaccggacgggattgctgtttaagcagcagcagaaaaacctcggcgagctgaacggttttattgaagagtcgatatcaggggcgaaggtcattaaagcctattcgagggaagaccgcgtcatggaacaatttttagaaaaaaacgcggcgttacaatcatcggggttttgggcgcagacgatttcgggattcattccgaaagtaatgaactctttaaacaatttaagctttacgattatagcggcggtcggcgggctgtttgcgctgaaggggtggatctcgatcggttccatcgtcgtattcgccgaatattcgcggcagttcacgcgtcctttaaatgatttagccaatcagttcaatacgatgttatcggccatcgccggggctgaacgggtgtttgacgtgcttgatgaaaaggaggagcgggaagatgaagagcatgcgctgtaccagccgatcaaaacgggagagattgaattccgagatgtctccttcggctatcaggaagacagcctgatcttaaaacacctgtccttcagcgttccgaaaggacagtccatcgccttcgtcggaccgaccggagcgggtaaaacaaccgttacgagcctgatcgcccgtttttacgagccgaataacggaaaaatcctcattgacggaacggacatcaaaaaactgacgagatccagtctgagaaaaaacatggggtttgtcctgcaggattcctttctctttcagggcaccatcagggaaaatattcgttacggccgtctggatgcatctgatcaagaggtggaggcagccgcaaaagccgccaatgcccacggattcatcgaacggctcccgaaaggctacgataccgtccttacccaaaacggcgcgggcatcagccaaggacaaaaacagctcatttccatcgcgagagctgtgctggcggacccggtgctgctcattttggatgaagcgacgagcaacattgatacagtgaccgaagtgaaaatacaagaagcgctcggccgtttaatgacgggcagaacaagcgtcatcatcgctcataggctgaacacgattcaaaaagccgatcagattcttgtgctgaaagacggcgaaatggctgaaaaaggaacccacgccgaacttctcagccagaacgggttttaccgggaattatatgaaagccagttccgggaatcgtagatagggaaaaagacctccgacagagtgcggaggtctttttttcgcgaaggcaaatagtacttttaagttattttcgttaaatgtaacaaaattacttgacgtaaataagttatgtatatatactagcttacataaagtaagtgataataattttcaaggaggattttatgaataaatcattcgaaacaggaacactgcttttaagggttgtaacaggtattatcttttttgttcacggtttatccaagtttcaagggttggaaggaactgcgcaatttttccagagcatcgggattccggcctttatggtctatgtcatcgcgacgattgagcttgtcggcggggttctgatctttttcggtttggcaacgcgcattatcggcgttctgtttgccgtcacattagtcggcgccatcttcacggcgaagctttcctcaccatttatgggcggatcggaatttgatttcatcttactggttgcgtcaattcacttagcgctttcaggaagccgtctgctttcattggatcagctccttttcaaatcaaaaaagggagaaactttttcagcataagaaagaaggcgttcaaatgaccggcattcatcaagatacggcaatcggttatgtcaaattgaccattaaaaatatggaacgctcgctcggcttttaccggaatgtaatcggccttcaagtcatctcgcagacagatcgttcagcaagactgtcagcagacggaaaacgcgtcctgctggtgcttgaagaaaatccaggcgccgtcgttctgccggagcggtctgtcaccggcctttaccatttcgcgatacttttgcctgaccggaaagaactcggcatcgcattggccaggctgattgaaaacggcatcgcgctcggtcagggggatcacgcggtcagtgaagctctttacctgtctgatccggacggcaacggtattgaaatatacgccgatcgtccccgcagcacgtggcgccgggatgcagagggcaattatgtcatgcaaacggcgcccgtcgatgtggacgggcttttggaagaagccggagctgaacggaaaagccgtctcccagaaggaaccgtaatcggtcacatccatcttcatgtgacggatttacaggaagccaaagcgttttacaccgatatcctcggttttgacattgtcggcaattacgcgggcatgtccgctctgtttgtttcggcgggagggtatcaccatcacatcggtctgaatatatgggccggaaaacatgcgccgccgaaaccgggaaacgcaagcgggctggattattacaccatcgcgctgccgcatcaagaagagctgtcacgtgtgacaaaagcgctgaccgatgccggctttgagatcgaagaaaaagaagagggcgtattcgtcaaagaccctgtatcaggggcggatatcgcatttacactgtaagaaacaaaccttgccgtctaaccggcaaggttttttatttttctgaagttttcttgggaaggttcgggaaagaagaacgtcgatttgcaatatacacacggcttttgtgtgactaaagagagcgaacatctcagtgaggcgcaaaaatgacgcgtggagccgccatcgccggcccgagctcagagcatccgccggattgaaaaagctgtatgggcaggatttgaatagaaaaaggcaaaagccgcatccggtcacaagatgcggctttttatacacaatttacaattgtgtgaaaaatgctcaaaataaattgtgcttcctgattcttcctgatatgataagccgaaaaaggagaacctgaacaaatgaactcaaatgcagcacagacggaacagccgatgaaacataacggaaaccggatgacggtcaaggactttatcattcttgccaaaccggggattatcatctcaaattcactcgccgcattgggcggattttggatcgcatggattcagtcagaaaggacgggcggagggcccgggatatttgccgccatggcggttgccatgatcggaacggcgttggtcatggcatcaagcactgtttttaataacttttttgaccgcggcatggacgcaaaaatggcgcgaacccgcacccgcgccagcgtcacgggaaaaataccgccgccggtcatgatcctgtacggcacatgtctcggcgcatgcggattcatcatgcttgcttcgcttaatgtactgaccgccgttcttggcttgcttgcatttttgctgtatgccgtcgtttatacgctttggtttaaaagacaatccgtctggagcacatttgtcggcagttttcccggggcggctccgcctttaatcggttattgcgcgctgaccgggtacattgatatgcccgcgattttgttatacgcgattatgtttttgtggcagccgccgcatttctgggcgattggaatcaggcgaaaggaagagtatcgtgccgcaggcattccgcttttgccgatcataaaaggcaaccgcgccacaaaaataaaaatgctgcgctatatcgccgttctgactgcggtttcgctgctcgttcctctttatatagacgtcagcccgttttataccgcgtccgctctcctgctcggagccatctggctgtaccggagcgtcaaaggctttcaggcggcggatgacacgcaatggtcgaaggggatgtttttttattcgattgtgtatttcagtctgctttttcttattttaatggctgattcgtttatcaatgcggttctcagaacgtaaacaggcggcttgcagatacagagccgccccgttttgtttatgcttttttgatgagagccaaaatatcttcaagccaggaaatataattccgttcccgctcaagcgcttttgtcagcacgagataatggccgaaatcaggagaagaaaaagaatccgcctccgcggacgatgtcatcagttcttgataactgttttccagatcggacaatttctccttccgctttacgagctgatcggtgaatagctcatccgcttcttcctgcgtcaaagctgagatgaaataagccttcagcataaattcatccttgaccgtttccggaatcgggtcttttttcgtcagccaggcagcaagctccagatctcccttgtcagtcagcgtgtacatttttttctcaagcttcgttccttgaatcgcagtgcgaaacgtaataaatccctcagccgtcagtttttttaattccggataaatctggctgtgctttgcgctccaaaactggccgagctcttctttaaaatagctcgatatatcatatccgctcaattcgccttttcgcaaaagccctaaaatcgcgtactttaaaattctcatgttgccctccaagccattcatttgacagctagtataccatacggccgctcaaaaacgcagaagtgccggatgcttgtaattgaatctgcggcggcaaaatcagcgaaaatatgcagaaaggggttatcgaaacggcagcagaactggaaaaagcctttctcatgtctttgcctcattcatatgacaacatgatataatcattgtaaaaattaagaaataatgggagggacatatgaagacggtgattgtgtatgcaaacccggatgagaacagtttcaatgcggctctcgtaaaatacgtcgtcatggctttaaaggacagcggccaaagctatacggtcattgacttatacgccgaccaatttgatcccgtgctgaagtacggcggcgaaaaaaagcgctctgacatgaaccgggacgctgaaacgaagaaataccggaaactgatgaaagaagcggatcatctcattttcatctacccgctgtggtggggaggcgttccggcgattatgaaaggcttttttgacagagtgcttgtcgccggagaagcctacacatatgaaaacggccgcgtaaaaggactgctccgggcagagacggcacaggtcttttatacggcggattccccgggctggtacttaaagtggttccggaaaaactcggactggattacgctgaaaaaaggcattctgcaattttgcggcattcaaaaagccgagcggaaccttttttctgtcgtcaaaacgagcacacccgagctgcgggaaaaatggctgcgccaagcatacgctaaagtccggcgcgcttgtgaaaaaggagcggccgcatgcagataaaagaaattttcgtgattcgctgcctgtcctgtttaagtgtggttctgcttcacgtagtttcaatggtgctgatgattcaggaagagtccttagccagtgccgcccatacggttgatgcttttcggaccctgttgatgttcagcacgccggcgtttatctttatttcggaatttctgcttgccaggtcatacccgggaggcgttcccgcgggttttttaaagaaaaggggcaaagtcattttcgtgccgtttctgtttattgccgcggtggatgccattttaatgaaaagcgtggcggaagaaggagccggcttcgtttcagtgatcggtaaatttttagaaaatgtgtttttaggaaacttcatcggctacttcattcttgtgatctttcaattttacattctccatatgctgctgcaccgctggctgaacaacaaatctcccatgtgggtgctgtctgtgtcgtttatcatcaacgccgtctatctggcttacttttccatctttcatccgccggcatcatcggggcttgattctatttttccgttcttttgggttccgtttccgggctgggtgttttatttctgtctggcattttattgcggaaaggaatatccgcgttttttatcgctaatcaatcagtaccgttatgcggtttacttcagtgcggccgtatcggcactattgattgtggccgtttcatatatcagcggcggctccatttcctctaagcgtccggatattatgatttacgcggtcagtatgatctttctgtgttttcatctgttttcaaagctcaaaaaagtgcccgcgattgtgatgatgatcagcaactattcgttttcaatctatctgctgcactcctactttttaatcagcggatatcttctggaaggctatttgcgatcaatgcctttgccggctgccatccttcttttatttttgatctgcacgctcggtcccattttcgtatcttgggtgtgcaaccatttcagatacggatacctgtttgtcgggaaagtgtatcagccgaagcagaccaaaagaaatacggcggcgcatcaaggccgcacagtctgaaaaaaaggcggcgtttcagccgccttttttgatacggaagttgtacataacctgcaaacgaaaccccccgcggcaagccggaagcgaatgccaggcaagcagtatcgggcagcctatctctaattttaatagcgctttcactgtaaggctgaagaccacgctgcggccgttttgacggatgcatttatgacaacataacgccatcgattttctcccttgtgaagaccgatatattgtatacttataggaaatactttcaaaaaaagtgaaaaagagaaaaactgtgagcttggatgaacgactaaaaaggagcggggacattatgaatgactgtgtcaaaacattcggagaacttccggacgaactttattcctttgcgggaggaaaaggaagcattctctctaaaatgtatcaaagcgggtatcctgtgcctgaagggtttgtgattttgccgtctgcctttcaggacggacagctgcgccatcaggcgagagaggctgttgatcaatatgtgaaatccatccgcagccgccatgcatctgcgttgtttgccgtacgatcatccgcgctgagcgaggattccgctcaggcttcctttgccggagaattcgatacggtgttgaatgtcaaaacagatcaagatatgtccagggcgattgatgaagtccgccgatcggcacagtcagaaagggtaaaagcgtacagcgccgttcagggaatggaagatgagcatgaaatcgcaatcgtcatccagctgatgataccgtctgagatatccggagtgctgtttaccgcagatccgattacggggagcaggcgggagatgacaggcaattacgtctacggtctcggggagcagctcgtttccggggaagccgatgcctattcttttaaactggcacggcctaagaaaaaatatgacggccccggggaatttcgcaaatatgcgtcaaagctctataaactggcgaaaaagctggaaaaagatctcggagggccgcaggatattgaatgggccgccgcgggcgggacattgtatattcttcaatcccgcccgattacgaccttacaagccggaaatctggaaacctatgaatggaatgattctttcagcggtgattttttatggacaaacacaaatataggagaagcgattcccgatgtgatgacgccgctgacatggtcgctcctccggaatctggatgaagagtcgggcatcattccgggctattatgtctggtccggcaatatttgcggcagagcctataacaatatgagccagcctctttccgttctcgccgctttcggtctgaatccgaaaggcggaaaaataggaaaaatgatgagcgatacattgggagaaatcccggcggaaatgaaaattcccttatatccgttctcaaagtatgaacttttgaagatcatctcgaaaaaactgaaaccgtatctgtcgaaaatgaagcacgcgaaaaaaaacatgtcctcctacttggacgaatcgccggagtggtgccggaatattgaggaaaagctgaaacgggccgaaacggagcggacattattagcgatatggaacaatgagatctatccgtatttatgcaacgcgtggtttgcgttaatatccggcgggcgtgattctgcgcaatcctcttcgtcgttaacctctcaattaacaaaactcgcagggatagaagatgcgaatctcctgctctccaatctgaggggaaaaggcggcctggccagcctggagccgattatcggcattgatcaagtcatgaaaggccgtatgagcgaggaagaatatctcaggaaccaaggccaccgtggcccgcatgaatacgaactttccataccgcatccgggagaaaaccgggattggctgacgaagcagatcaaagaacacaaggagtcgggtattgatgccgaacaactgcttttgaaacagcagcgggcgcatgaacaggccttccgaagatttgaagaaaagtttcctcataaggtcaaatggctcaaagccaaaatggaaaaagcgtcagaatacgcgaatattagagaaacaaccagatccgaatttgtcagggtgtaccggacagccagagcattcgcgctcagagcggcggaaatgaccggcatgaaggacgatattttcttcttgtatctgcatgaaataaccgatctgctcgcggggaaagagccggcggttgcgtcgattcaagcgagaaagcaaaactatgaaacctataaaaaactgccgccgttcccatccgttattaacggaaggttcaatccgtttaaatgggctgaggatcctgacagaagagcggattattacgatgcttttatgcctgcggaaactgatgatgcgcatactttaaaaggtttcgcgggagcggccgggagagtggagggcattgtccgtgtccttgatgctccggaagacggggattcttttgcggcgggggaaattttagtgacgtcgacaaccaatgtaggctggaccccgctttttccaagagcggctgctatcataacggacgtcggcgcccctttgtcccacgcggcgatcgttgcccgggaactgggaattcctgccgttgtcgggtgcggaaatgcaacgtcaaaactgaaaacgggggacagggtggccgttgacggcgggcaaggcattgtccagctggaaccgcggcagactccggtcacttctgaagaggaaaatggtaaactgatagaataaaaacatgggaaaggagccgcgcatgaataaagcagttattaatggggagcaaatcagaagtatgagcgacctgcaccagacattgaaaaaggaacttgcccttcctgaatactacggtgaaaaccttgacgctttatgggattgtctgaccggctgggtggaataccccctcgttttagaatggagacagtttgaacaaagcaagcagcttacagaaaatggcgccgagagtgtgcttcaggtctttcgtgaagcgaaagcggaaggctgcgacatcaccatcatactttcataatacgatcaacgggagagggacaaaaatggaaaaacaaatcctcagctatccgattggagagtatcagccggctgaatcgatttcggccggacagaaacaagaatggatcaatacgctcgaacacgctccggccaaactgaaacaagctgtcagagcgatgtcggacagtcagcttgatacgccgtaccgcgaagggggatggactgtccgccaagtggttcaccatctggcggacagccacatgaacggctatacccggtttaaattgagcttaacggagaatgaaccggaaatccgtccttatgatgaaaaaggctgggccgatcttcatgattccaaaactgccgcttgcggggatgcgcttgagctgttaacgatcctgcacagaagatgggccgctcttttgcgctccatgacggaagcccaattcaaacggacatacttccatcctgtatctaaagagacggttacgctggaacaagcgctcgggctatatgtttggcactctgaacatcacatcgcccatattactgagctttcccggcggatgggctggcatctgtcttagaggatgccggcttccggaaatacgccaaaaccgccgcagacacaatcgtgcataatgaaatgacggcggctgccgtataaagatggtggtagccgctggaaatgcccgcttcaattgcatcagaaaccgcttttttgacggcgggaacggggattcggcttacctgctcctgcaacgaagaaagtccgccgccgatatcgggcatttgcgcctgatcagcgggaatgccgcttttcgctaaacggtttttgatgtcatctccgatccggtcaaagcccgctgtaatgaagccggcatataaagccggagcgagcgtcagcccgacctgccttacgagtgacagcgtgccgagcgctgttcctttgttttggcccgccgtttctgatacaagcacattcagcggagccccgagcagaaatccgaaaccgatccccgcaatgacactcgctgtgacaaattcccatttatccgtcacccataacggaaacaggctgaagccggcaaatgcgatggcgcctgatacaaccgcggaaaagaccggcccttttttatccgtgatcgccccgccgagccacgctccgatgcctgacgccaacgcgagcggcgtcatccaataacccgctttctccgccgatacgtgcaaatattgctccgcataagaaggaataaaaatgaccgcagcgagcagccctcccgataaaaatccgatgacgagcgtccattgaaacactttattttgcagcagcgagtaggcgagaatcggatcgccccctcggttttcaacccgcttttcgaccttaagcagcaccagaaagagaagtgcagctcccaaaagatacccgtatacctttacgtccattatgctttctgacagcttcgccccatcgagattcgtgataccgatcatacaagataagatcgcaagagacagcagcattgtgccggcgaggtcaagccgtttcgcctcaggctctttcgtttcagcgataaacaaaccgccgcacacaaccaaagcggcggcaatcggcaggttaatcaagaacagccaatgccacgatccggttacatcaagcaaaaagctcccgatattcggtccgaggacggccgccataccgttcatcgcccctaaaagcccgagagctttcccttgtttctccttcggaagcacggccagcacatgcgaactcccgataataaaaattccgccgccgccaagcgcctgaatgagccgtgccgccaaaaacatcgggaagctctgactgagtgcgacaagcaaagagccgagtccgaacagcccgacttcaatcataaacagctttttccgcccgtatcggtccgacagcttgccgacaatcggcacactgacactgagtcccaatgtgtaaagggtcactccccacgatccccatgaaggagaaacatcaaaagagctgttaatcgtcgtcagagcagcggaaataattccgttgtccagcgccgccatgaacacaccgatcgtaaagagagtgatggcccggctctggttttttactgtttgcaatggctccggcatactgatcaatcctcctgtttttaattcacttcgaatatattattcacttcaagtgaattaaatgtcaaacaaaaaaaggccgccgataccggcaggcctttttcatctctatccctgtttggaagaatcaagcgctcttgccaaaatggcaagcccttgattgaccgtttgtttttcttcagcggtcagtgtttccaatgaacgcttcaattttacatgtcctttttgataaaggctgcggaaaatatctttcgcgttttccgttaattgaacgacgactgaacggcggtcttcttctgacggagcgcgtgtaatgaaacatgatttttctaaacggtcaagcagccccgtcgtatttgaaagggaagcgcccattttctccgctatgtcactcaccttaagcgtcccgtggttgttcagaagcatcagcaccttcatttgcggcatgctcatatcaagcttcatccactccgacacatcgccgagccccgccgatgtcatcactttcatgtacagcacccaaatatcccgttcctcaggagaaaaaatatcgccgcttaatactgttgtatcatgcagattataatccatcgtctcacttcctcatttatactcctgcataccatattactgattttaatcagagaaagaaagttgcagacgagttttgtttgaatgtgaggtggtagtgtataatatgttggagattattgggggaattataataaataagctattttatgatgattggagagaacattgctgactaaaaagaatgccttatcgatattaaaagtattatttcctattgcagttttgcttttagtcatttatcagtccaaaaaggaattgacagacctttcttttaaacgaacgctgtacattattaacgggattgagcgttacgatttatttattctcgttctgctcggccttcttgccgtcagcgcaatgtccttttatgactttgtgctgaaacggacgcttcgcctcaacattccgaattggaaagtattcagggtctcctttatcgccaattcctttaacaatgtccttggattcggcggtctggcgggtgtcgggctgcggacgatgctatacaaagaacatacgaatgacgtaaaacgcctcgtcgcaggcatcgcctggcttacgtcctcagcgctgctcgggctgtccgtcttcagtatcctgaccatcgcccgggttctgccggttggagagattacgggtgagaaaccgtggctgtgggctgttatcgccggagtggcgcttatagtgccggcagccttaatcgccgctgggatcaacaataaaaaagctggcgcagaagacggtgaagcaaaaccgaggcatccggttttttcttacatcggggcatcgtttgctgaatggtttgcggcggccgtcgtcatgtattattccctgtatgtcatggggattcacgcggatgtccgccatgtattcggtgtatttgccattgccgctatcgggggaatcatcagtcttgtgccgggaggattcggttcgtttgaccttctgtttctgctcggcatgcagaatatgggctttccgcaggaggcggttgtgacatccatcgtcatctaccggattgtgtattcatttattccgtttgtgttcgggctgttctttgcggctggcgatttaacggaaaatacgcttaaacggctggaatcaaatccgaagatggcgcctgccgtggaaacgacgaacgtgcttctcgtattccagcgcgctatcttaatcagggtgctttacggttcgctgtcgcttttggttttcatggcgggagtcgtcgtgctggcgtccgtcgccctgccgattgacagggagacggtcatcccgcatattccgcgcccggcgctccttgcgtttaacgcgttatcgttaagcgcggctttgattcttttaatcttgccgattgaattatacaaacggacgaaacgttcttattcaatggcggttgccgcgctggtcggcggttttgtgttcagtttcttaaaaggattgaacatcagcgcgatctttattctgcctgtcgtcatcgtattgcttgtgctgttaaagcggcagtttatcagagagcaggcttcgtatacgctcggccagatgatttttgcggccgctctgtttattatcgccttgtttaactacaatctcattgccggctttatttgggataaaatgaatcggctgctgcgccacgattatttcgtccataacaattcgcacattacatatgccacgatgacggccattattgttgtgccgctgtttttccttttgtttacgttcttttatcataaaagatcgaagccgatcggagaagaggccgatcctgaacggctgaagtcctttttggcggaagaaggcggaaatgcgctcagccatctcggctttctcggggataagcggttttatttctcaagcgacggcaaagcgcttttattgttcagccagatttccagaaggcttgtcgtgctcggtgatccgtcaggacagagagactcttttccgcttgtgattgaggaatttctgaatgaagcgcataagcaggggctgagtgtcatgttttatcagatcgaacgtgaagatctggcgctgtaccatgacttcggctataacttcttcaagcttggagaagaagcgttcgtggatatggaggcctttacgctctcaggtaagaaaaaagcggggctgcgggcgattaacaacaaatttgaccgcgaaggctacacatttcatgtcggggaaccgccgttttcctccgagtttatcgccaagctgaaagacatttcggacgaatggctcggaccgaaaaaagagaaaggtttttctctcggtttcttcgaccgggattatttggaacaggcgccgattgcttacgtgaaagacgcggaaggggagatcatcgcttttgccaacctgatgccgatgtatcaggaaggcgagatatccgtcgacttgatgcgttatcggaaaagcgcgccgaacggtattatggacgcgcttttcatccgtctgtttctctgggcgcaggaaaaaggctatactaccttcaatatgggcatggcgcctttgtcaaacgtaggaacggcttttacttctttctggtcggaaagaatcgcggccgtcatcttcaacaacgtccggtatatgtacagcttcagcgggctgcgggcctttaaagaaaaatacaaaccggagtggcgcgggaaatacttggcgtaccgcaaaaacagatcgctgtccgtcacgatgatcctcgtcacccgcctgatcggaaaaaccaaaaaaagacgccgttaaaaggcgtcttttttttgaataattgactaaaaattctaatttcactctgttatactgaataacatgatcataaggtgaaaggatggctgatgaatgaaacaggcaaccgtgtttaaatatgaagcgttttccgatattccggatttgggaaatcccgcgggaatcgtctttaacggagatgattattcagatgaagagatgcagatgatcgccgaaatggcagggtacaatgaaacctcatttctctgtaaaagcggagaagccgatctgcgcatccgctattttacacccggccacgaaatgaatttatgcggacatgctaccgtcgcctctctttacgcattaattgaaaagggaaggcttcaggctgatcagacatatcaaattgaaacaaaagccggcattcttcccgcaaaagccgctgaacgaaacggccgggtatacatcacactcgaacaggctcccccgcaatttctgccgtttacgggtgacaaagaaaagcttgccgcctcgctcgggattacggctgaggattttcacagcgggctgccgattgtttacggatcaacggggatctggacactgattgttccgctgagatcacttaaagcatcacggaatatggtgccggacaacgcacaatttcccgctattttgcgcgatcttccgaaagcgagcgttcatccgttttctctggaaaccgtccatccggaaagtgatctgcacggacgccatttttcttcccctttctccggaacgaccgaagatcccgtcacgggaaccgcttcaggcgtcatggcagcctatatgcggcaatacggaggctccgaagccgaatgcctcacgattgaacaaggccaggaaatcgggaaagacggaaaagtggaaatcaggatcacggaggaaaacggagagatgaacatcaagatgacgggaacggccgtgtatgccgaaacaatcaattttcagcttccgtaacggtttacaaaagccggtcgtatccgttatattataaatgataatcattttcatttggataggaaggtgaatcggcatgccgaaaaccgaacaattacagcaaaacgaaagtcttgcacatacaatcagaaacagaagatccatccggtcgtttaaaccggaaaccgtaccttctgaagtcatattagatatgcttgaaacggccgtttacgcaccgaaccacagactgacggagccatggcgttttatctacgcagcaagcgaagcgggaaaagcaaagcttgcggacagctacgtctcatttttcaaaaagataaaagatgatttcaacgaggaaaaagagcggaacatgagaaaaaacctcagcgccgttccgggatttttgctggtcgtcttaaaagaagatgaaaatgaatttacgagaaacgatgattttgcggcgctgagcggcatgattcaaaaccttcagctcctcgcacatgaaaacggcatcggcatggtctggaaaagcggccgcattatgtatgacaaacaggtgcatcaagacttcggccttgctgacaatgagcgctttgccgccatcattcaaacgggctatccggatgaacagcctaaggcgaaagaacggacgccggcaaaaaacctgtttaccgaactgtaaaaaaaatccccgtctctatacagaggcggggatttcgtattagcgggttttgcttttagctctgttgtcagcggctttcatccgcgcctgcgcttcacggtcagcggagtcagcaagctcgcttgaatattcctcatatgtgccgtctgtttcgcgtttcaaagcatccggaacttgaggaagtttttgtttgtttttatcacggtttttgtgagtatgatttctgcccatatcaatcgccccctgaaaaaagtgatatcaaacaaacatagtatctgcccaatcccgatctttattcagtttatttccgtttggctgctctttccgcttttttgaattcaccggaataaaggacttcctgcatttttttcagattggctccctgctgatgtttttcgcgcttcttttccataaaagaagaccctccttcaaaacagaataccaataggattggcttttatttccgtttttatgcagataagagatcctttaaagcggaatcaagttcttcatacgtaaattgaaaaccggatgtcagcgcctgcttaggcagggcgcgctggccttttacgatcaacaggctcatttctcccaaggccttctccagaaaaagttccggtacgggaatccaatgggggcggtgcaggacgcctgcgatcgtctttccgaattgcttcatttccacggggttcggcgatgtcacattcatgggaccggacaagtcatcatgctccgccgcaaaagcgatgagttccgcggcgtcatccacatgaacccatgacagccactgccgtccagagccgatggtgccgccggctaacagcttataagggagaaccatgagcggcagggcgcctttttcaccgagcatcaccccgaatctggcatataccgtccggatgccgagcgcttcaattttctggccttcacgttcccacatatgagccgtatgactgagaaaatcttcatttgacgtatctgactgttcggtgaacgttttttctgtgcttgtgccgtaaatgccgacggcgctggcctgaatcaaagcccggggttttttcggctgctgcttcataatccgtctgacttctctcgtcgcttctattctgcttgagatgatttgttccttcgttgtgtccgtccagcggtcaaagatggatttgccggcgaggttcacccatacatcaatagggggaagctcgcgctcaggcgccgcgttttcggccagccattgaacatatgtcacatttttttgttcggtttctctctgttttcttgataaaatatagacatgatgtccccggcgggtaaacacacctgtcagatgccggcccagaaaaccagtgccgcctgtcatcgcgatattcatatccatctctccttacacgttgatacatatactgtacctcatttgccaaaaagaaaaacgcctgaacatcggggcgggaaaggagaccgggatgccctttattacaaaaatatcgacccaaaagaaaaataccgagcgcttcaacatctttcttgatgagaaatatgcattcagcgtcgacgccgacgtgcttgtgcgttttgacctgaaaaaagggaaagaactggacgagcttgacattcttgaaatccagtacggcgatgacgtgaaaaaagcctttaaccgcgccgtagaatttttatcataccggatgcgctctgaaaaagaagtccgggatcatctgaagaaaaaagaaacaccggacatggtcatttctgaagtcatccataaactgtacgattacagctacttaaatgacaaagaatttgccgaagcctatgcgagcacccacaaaaaaacaaacggcaaaggccctgacgtcctgttccgcgagctgaaagcgaaaggaatagacgacgataccatcaaggagacgctcagtgcgtttacatttgatgagcagatacaagaagcgctgaaacatatcggcaaaatcctgaaaaaagacaaaaagctgtccacaaaagagatcagacagcgggcgcagatgcagcttcagcgaaaaggtttccctttcgacgtcatcaatgccgctctggagcagacggagtatgaaaatgatgatgaagccgagatggaagctctgaaggctcatgcggaaaaagcgatcaggaaataccgttatgacggcagttatgaaagcggaatgaaggttaaacagtacttattcagaaaaggattctcgattgacgatattgatcaattcttgcaggaagaggagtaaactgaaatggacaaacgatacagtcaaatgacgtctcatgaactacagacagaaattgcgggactgacggaaaaagcgcgaaaagcggaacagatgggcattgtaaatgaactggccgtgcttgaacggaaaattacgatggccaaagcttacatgctgaacccggaagactttcggcccggcggggtgtatcagatagaaggttctgatgacactttccgcattgattacatcaacggcgtattcgcctggggacacagatcttccccgtctgacggggaagaagcactgccgatttccgttttaaaagaaaaaaaataacaaaagaggccggttccggcctctttttcttttcgggcacattcgtttcatactttcagtaaaaaatgattgaattcatttttgatatcttttaagatggaattcgttgttttttaataaaaaggaggcgatttgcgttgaatatcaaaatgaaacagccatcagtgaaattaatgatttttgttttaatgatttgcacattttccatcgggtatacggaatatgctgtcatgggtattctgacgtcgattgccgatgactttcatatacatgtatcttcagcgggcatgcttgttacggcgtacgcggcgagcgtctgcctgacgggcccgatcgtaaccattatcgcggttaagctgccaagaaagccggtgctgctagggttaatgggcatcttcgtccttgccaacctgatgagcgtctttgcgccgaacttcgccgtgctggcgatttccagaattttatccgcatccatccacggagctttttttgcgatcgccatggtgtttgcgagtgaaatggtgccgcctgaaaaacgttccgccgccgcggcttccatgaacggcggattaaccgtggcgctgatgctcggtgtcccgttcggctcttatttaggggatgcccttaactggcgggccgtctttttcattatttccgttttaggcatgatcgggctgatcggactgatgctggtcgtaccgaaccggaaaccgaaagtgattccgatgctgatgaatgaatggagtgtctttaagcataaacaagtgattttttcctttgcgatcaccattctcggctactcaggcgtatttatcgcttacacgtttattgagccgattttaagagattcagcggggttcggcacagtcggcatcacaggtgcgttatttgcctacggtctcggcggagtggcggggaatttcttcgcggggaaagtgccgctcaaactgctgacacgcacgatgatcggtgtgatgatcggcttgatcggcgtcttggcgattttcccttatatcgctgtttttcccgccgccgccgtttcagcgacatttttattcggcgcatgtgcgttcggcacgccgccgcttttgcagaccaaggttatttcttcctcagaaaacggcacgacaatcgccgctgcggtgagcgtttccgcctttaacctggcaaacgcgctcggcgcctggatcggcggattgattctcgggggaacgggatcttactcatggctgtttgccggcggtgcgctgatgacggctctcggccttgtgctttccacgttcgctcatctgtctgagaagaaagatgtctatgaataccaagtgcataaaggataacaaaaagcttgcaggggatattccgcctgcaagcttttttcagtgcttcaatgtaatgctgatcaccgtatgtttatcactctcagctaaggacatattccgggtttccggtactccgtctttttcaaaaacgacggcataggttcctttcgcgccgcttttccatgcaatctcgccgtggtgatcagtcttgcctattatctctccgcggtctatattcggctgatgatctgactccgccgctttcatcacggtgaccgtcacaccggccgccggtgaaccgtctgcatcctcaacatggagcgtaacgggcaatgcttttttggcggcggaatcgtccgctttgccgcatccgcataaaacggccgccgcgagaaagaaaacaaaagctttattgatttgaccaatattgaatgttgtcgaatacactgtttgtcacccttgttcccagattgtaagacgacccgccgtttgtatgaatggcaatggcggtctggccggtgtcgctgtaattgcggtaaacgggcgatccgctctggcagccgaacgtatctgtcgtgtaagtgagtttatatgtctcggcagaacgaatcggcttgctgtccgaccacatggaaccggacactttgtcgcacggatatcctgtcacggttgaggaaagcccggccggactggaactgttggtcgtccggtagccgtaccagccgacggtattcccgggcgacccgtttactttgattgcgccgtagtcgtagtttgtgtcaccgttttctgtccaccctttgacactgtagaatgtcttgcctgaataagagccgtacgggtacgatgatccgttgcggccgggagctgccgtaattttcgatgcccagccgtttttctggtcatacacgcaatgtcccgccgtaacgatcgtgtcggcattgacaaaaaaaccggtgcatccgtaggtgcttgtgctgccgctgtatgtaacggtcagctgtgctgtcgctcgatatggaaatgatgttgtaggagaaattctgattcgttcgtctgtcccaataatactggaaggctttaatgacttgatgtcagctttgctgttttgtgcaagctgtcttttggtgaggcccgttccttcataagcgggggatgtctgtgttgtttgtacaggctgattctgatgtgcgtcaaactcctcaccgctgtttgatacagatgtctgcgggctgcccgctgcttcagctgaaacagcaaataatgaaactgacagtaagaatgcggtaaggctcagcaatcgttttgaaactgtcttcattttataaaacccctccttttttgtctaccggctttcgttttaacatttaacatattatggaatttatttagcgttatgaccgcaaaaggatgtttttttccgcaaaaaaaaaagaccgggtcattcccggtctcttacggtgtgtgtgttatcgtctgcctgaagctctcatgcgttcttgcgggtgcgaattaattgaaccgtccgcccgtttagaagcgtagtcatcctttgcccgcggttcgccttcaaacttattattgttctgattaggaaatccttttgccttgttccggaccatttgttttccccctcggccaatatcaaaaggttgcgccttctggactgaagacgtaaagttagtatatgcctgtgacaagctgcgtaaaagcagcaggttttcccaaggaaaggagacagagacatgaatacatatatcgacaaactgacgaatttgctgcttgagaaaaatgacatgctcagctatttgcaagcgcgaacttgggttgagcttttatggggagatttcgaagcgacttacgcaaaagccggccgcccgtatcaaggagagcaaatgacagaacgcgtcgtcaaggaatggatcgaatcatacggcagcaagctccatatgttccagagcgttcgggaagacgtttctcattatttggatcaaagcaggggtctcctgcattaacatagcagttcgcccgccggatacaagtccggcggtttttactttttataaaagaaatagaaaaatcatgtttggcgaccggcggaatgtggaaatgtgtaataacttataaaatagcggggaggaaccacaatgaacatgaaaaaggggttaaccgcatttattccggccgcaggactttgtttatttttagccgcaggcaccgtttttttcgatccggcagcgaatgccgcagcagttcaccagacaaaaatagacaccgcagcagatacatatatcgtgaaagcaggagaacttaacgtccgcaaagaaccaaataaacaagggtcgattatcggcacgcttcgttcagaggattccgtaaaggttaaacggcttcaaggagcagattgggctgagattgactacaaagggcacaaagcctatatctccacacattttctgatgaagcagccggtgaaggcggtgacggcgaaacaaaccgctttttatacgccgactttggaaaccggcaaaaaagggtccgttaaagcgggtgaaaccgtcaatgtgctcggctgggggttcagccatgacggaggatttgaccgtaaatgggcgtacgtcacatacggcgggaaagcaggttatgtgaaaacggccgacttaactcaaaaataaagattcaggcaggcgaatgagcctgctttttttctgaaaccttccgtctttcctttcgtaaaagatgaaaaggagagtgacggatatgataatggtaatcggcggccttctgatggctgcggccggcatttcagtcacattttttccgccgaagtcgatcaacagtctgtacggatatcggacgaagcgctctatggcggatgagtcgcagtggaaagaaggcaatcgattcagtgcgctcctcatgattttgttcggccttatatcggcggcagctggatttgcgggcagcctgcttatccggctgactcagccgttcgccctgatcgttcaggccgtattattgattgcgatcagcgtactgatcatcgtcttaacagaaagaagattgaaacaaaaggggaggagaatcgatgaatgacattacgtttcacatgatcgaaacaaacggagtgacgctgcacacggcttcagccggtccgaaagacggtcctttggcggtgctgctgcacgggtttccggaattctggtacggctggaaaagccagatcaaaccgctggcggatgccggataccatgttgtcgtgcctgatcagcgcggctataatctcagtgacaaaccggagggcattgaaaactataccattgatacgctcagagacgacattatcgggctgatcactcattttacagatgacaaagccgtcgtcatcggacacgattggggaggagccgtggcctggcatttggcatccacgcggccgcaatacgttgaaaaattgatcacggtcaatatcccgcacccggcggttatgcggaaggtcacaccgttctacccgccgcagtggaagaaaagctcttatatcgcgttctttcagcttccggaaaagccggaacggagattgtctgaagacaattaccgcgtattggatcacgcgatcggcttatccgaacgcccggcgcttttttcacgggaagatgtcgacagctacaaagaagcttggggcagaaaaggagcgctcacggcgatgctgaactggtaccgggcgatcagagccggcggtttaggccctgccgttccgcttaaaatgcccgttccgtaccgattaatatggggcgtcaatgaccgagcgctgagcaaaaagctcgccaaagaaacaaaacggatgattccaaacggcgacttaatcttcatagatgatgcctcacattgggtcattcacgaaaaaccgcgcatcgtcagccatttgattcatgaataccttcagcaataaagtctgtcccgcgtacagactttttcttttttttctcatatctgccgaaaaacatgacaaaatataaaccatatgcagaaaaaattttctttccctgtaacaaaaaaagggtttaaacgtcattaaaaaaaggaaaagccttactgaagttttgcggacaattccttaaggcagtcctaaaaaaagaataatacaaagaaggtgccttcatgaaacaaaggttaatctcaattattattccgtcttacaatgaagggaacaacgtcaagctcatccatgaatctttaaaaaaagagtttcagacgattcattatgactatgaaattttctacatcaatgacggaagcgcggatgacacccttcagcagattaaagaactggccgccagaaaccatcgcgtcaaatacatatctttttcccgcaacttcgggaaagaagcggccattttggcaggatttgaacacgtgcagggcgaagcggtaatcgtgatggacgccgatctgcagcatccgacccatctgctgaaagacttcattcaaggctatgaagaagggtatgaccaagtcatcgcgcagcgcaaccgaaaaggggacagccccgtgcgttccgtgctttcttccctgtattataaatttatcaacaaagccgtcgaagtggacctgcgtgacggggtcggagatttccgcctgctgagccggcaggccgttgatgcccttttgaagctgagtgaagggaaccgtttctcgaaagggctgttctgctggatcgggtttgaccagaaaatcgtattttatgaaaatgtcgaaaggaagaacggcacgtccaaatggtcattcagcaatttgttcaactacggaatggacggtgtcgtctccttcaacaacaagccccttagggtatgctttttcaccggtattctgatattgcttttgtcgatggtgtatattgtaacgacctttgttcatattctgacacacggcgtgtccgtacccggatacttcaccattatttccgccgtgctgtttttagggggcatccagcttttgagtctcggcatcatcggagaatacatcggccggatttactatgaaacaaaaaaacgcccgcactatttaattaaagaagcgaatataacgtacggagaacaaaatgaaacgaattatacaaaaaagcgcaagtggaaccattaaacagccgccgctgtgcgcagggtctggggacgttgtatgaaaaaaaataaatggatcttgccggcagcctgtgtgctggctgcggcagccgctcatatttttttcttaaaagagtggtcggcaggccgctatatgacggggtctggagacgggatcgcccaaatggcggtcttcaaaaagctgctgtttgatcaatatatgaacggcaggctgttttacagctattcgttcggactgggcgggggcgtgtacagtcagctcggctattatttctctacttcttttctattcctgtttatctccgccgctgtccgctttttgcagcttattcagctgacgggtgaggctgatgcgctgttttgggcgcaggcctccgtttttatcagcattgccaagcagagttttatcatattcacggcagcgtgtgtgttccgttatttcgtcaaacggacggtgcctgcttttgcgggcgccgtgttgtacggggtctcgattatttacttccggcatgaggtatattgggactttttcactgacagtatggtgtggctgccgttgcttgtgttgggcgcggaaaaaatcatccgggaaaaaaagccggcgtggtttatcttcgcctgtgcgctgacattgatcaacaacttttattttgcgtatattaatctgattttcatcggcatttatatcttattcaggtgggtgatcccccttgaaggcaatgaggcgaaaaagctcactcaatgcaggatatttattctgtcgggccttctcgggttcggcataagcgcagtttcctttattcctgtcgtatacggataccttcataatctgcggcctccgtattcagagcatattgcatggcttgatttttccgacaacattttattttctagcaggataatcatcctgccggcggcttttttgctttttctatttacatttactttatacaaaaaccgcttgttccggctgtttgcgggaatcagtctgctgtatattctgtttcacttcagtccgttcgcggcaagtgcctttaacggtttttcagctccgcagaacaggtttgaatacgtcctgtgcttcacgattgccggaacggtttcagccgggctttctaagctttcagacatcagcatgaagagtatgctgatgtccgccgtactcgtcgttctgctctattggagccaggtgaggcggtacagtctggatatgtctgatcacgccaacctgcccgtcatccttcttctggtgctgagcatagccgctttctttgcagcaaagacaagactgaaaggcgcggtgcccgccgtctatgccgtcattttgcttacagctgtgcttacggctaatacatatgaaaaatatgctttatcagaaggcgggaagatttatacggtatcgcatacatttatgacgggtgctcactataaaggcaaagaacaatcagagctcattcagcgtctgaaagaaaaagaccctgatccgtttgcccgtttagattggatgaacggtgttttcaataacaccccgatcatatacgggttcaacggattcagcgtatactcaagcatactgaaccgcaatctgctgtccttttactggaacgacctccagattgacatgggcagagaaagcgtcagccgctatgccacattaggaaacagggctaatttatacagcctgctttacggaaaatattatatgacggaaaaaacaaacgaggccggcgtgccgtacgggttcaaaaaaatcatggaatcaacccattatgcggtttatcaaaatcaatatatgcttccgttcgtacggacagccgatcgcgtatataacgagggcggcctgaaaaaagcgcccgcccttgccagggaacgggcaatgcttgacgggatcgtcatggaatcaagcacaaccaacacgaaaaaagcgcctgaggcgaaaaatatgatccgccatgcagaggtagcggccgaacatggcgattatcataacggcatcctgacggtaaacgaagacggcggcggcctggtcattacgccgcaagccgctaagatggacggcggcgattattacgtcagcttttatttgaagaataaagcgaaggaccagggctttacattaaaagtgaacgattacacgacaacgagaaaatcgaatcaatccatttacaaaacaggtgtcaacgatcttactgtcagagtgccgaaaacaaaaaacatccaaatccgtctgccgaaagggtcgtatcagcttgacagactggcgctttatgaagaacggtacgatacgctgaaaagcgcataccgaaaagcggaaaaagaaccgcgggccgatctcagctggcgcggaaatacgcttcatatctcgtatgataacaaaacccgcgcgccgtatatcatgcttccgattccatatgaaaaaggctgggagctgaagataaacggcagaaaagagcagattgaaaaagcggattattcctttatcggatttaaagcgcaaaaaggaaaaaacgatattcaattaacgtatttcccgccgttttttaaacccgcggccgctctatcggtgatcagcctcgtgtttgcggttatatatgtgagaagacaaaaaaagcccggctcttaaacagagccgagctttaattttttctgcaatttttcctcgctgaaaatccagcccgtgtaagaagagagaagctctaaatcatgactgaggtggacgatggcgacaaaaggatagtggcctttgctccggtagcgtaaatcaataaaacgcacctcataatgatctttaaaggtatcgacctcccacctgtaaacgggggaaaatgaaagaaaggctgcaatattttcgtcctgttttgcggccttcatcacatcggtttccggaacgggcacgcggttgaatgtatccaatatcacgacatggccgtcaaggcttctgccgacataaaaggcatgcgccgtcgtcacggcgatacgccactgcctgaatttcatcgtcggcgaaataatgatggtttcaatctcctcttcaatcatttcgcgcagccttcgctttatccgcagctgcatcaaaaaccggacggcgtaatatcctgtgaggatgatataaagcatcagaaatgtcacgcctggatgacctccgatataccacacggcaatcgcggccaaatggctgacgaaaataaacggatcaaaggtattgattaaaccgagagcgatccattttctcgaaaacgggcggatggcctgcgtgccgtacgcgttaaaaatgtcaacaaacacatgcaaaacgacagcgagaagcgtccacagccacaggtgcaaaaagttcgcttccggataaaacataaacaaaatacccggaatcagaacggaccaaaataaaacggcgggaatggagtgcgtgaaccctctatgatttcgaatataaacggcattatttttcagcttcaatatggtatcaatatcaggtgcctgagagccggcaagagcggcgatcataactgcctgagacatgggggtgtgcatgccgacggcaggatcaagagttgcgattccgccaagcgcgatacccatgacaacgtgagtgccagtatccattgttgacctcctagcaggcgttaacaatcagtcgcccgcatatttcgcattataagatattccccattttctgtttgcccaatcatggcgtttatccgccgttctcatatgtttccgctttttctttatcactatttaatgtaacatattatcgtaacgtgccctaagtttacaccaaaatacggtgtcaagaaaagcggaacccgaaacatctgaggagaagatatgaacgcacttgaagaaaaaatgaaacaaaaagatatagacaaatttcgcgaggacttaattacatggttcgaaagagaacagagaattctgccgtggagagaaaatcaggacccgtatcgggtgtgggtgtcagaggtgatgctgcagcagacgcgcgtagaaaccgttatcccttatttccggcggtttgttgagcaatttccgaccgtttcggcgctcgctgaagccgatgaggaaaaagtgctcaaagcctgggaagggctaggttattactcccgtgtaagaaatctgcaaagtgccgtaaaagaagtgcatgagcggtacgggggagtcgtccctgccgaggaaaaggaatttggcggactgaaaggcgtcggcccttatacaaaaggcgccgtgctcagcatcgcatacaacaaaccgattcccgccgtagacggcaatgtgatgcgtgtcatgtcgagaattctttccatatgggacgatatcgcaaaacctaaaaccagaaccattttcgaacaggcggtatccgctttcatttctcatgaaaaaccatctgaattcaatcagggtttaatggagctcggcgcgatcatctgcaccccgaaatcgccgtcctgcctgctttgccccgtacaaaagcactgttcggcatttgcggaagggacagagcgggagctgcccgttaaaagcaaaaagaaaaagcccggaataaaaacaatggcagccgttgtgctgacagacgatcaaggcgatgtctatattcataaacggccgccaaaaggcttgctcgccaacttgtgggagtttccgaataccgaaacccagaaaggaatcaaaaccgaaagagagcagcttgaagcctatttagaaaaagagatgggaacaaccgctgaaatcggggagctggaaggcatcgtagaacatgttttcacccatctcgtatggaatatttcggtctttttcggtaaagtaaaacaagtgtcggatacaacggaattcatacgggtcacaaaagaggagctcgaggaatacgcatttcccgtttcccatcaaaagatatggaaaatggcggaagaaagcggccgcctgtaaaaagcgtcagtcatagctgacgcgagtgccgtggccgtaatccgcttcattccgtttcagtccgccgcgggcttcgatttcctgaatcagttcccggtatttggactggccttcttcgtttaaatacggcataatttgctggaaggcatgatggaaataggcgagctctgaatctctccaatcttttttgggcatcatggccaattcgcccatatcacgtccgacatacatataaaagacccctttcaacacatattgcttttattgtttgttgaatgaaaagaactatacacagcaaggagctgaggaaaaatggaacaaaataaatgcgcactgatcacgggaagcagccgcggcgtcgggaaagcagccgccatcagactcgcggaaaaaggatacaacatcgtcatcaattacgcccgcagtaaaaaagcggcattagaaaccgccgaagaaattgaaaaactcggcgttaaaacgctcgtcattaaagccaatgtcggccagccggcaaaaatcaaagacatgttccgccagattgacgaaacattcggcagactggacgtgttcgtcaataatgcggcttcaggcgtgctgagaccggtcatggaactggaagaaacacactgggactggacgatgaatatcaatgcgaaagcattgcttttctgcgcccaggaagcagcaaagatgatggagaaaaacggaggcggccacatcgtcagcatcagctcgctcggcagcatccgctatcttgaaaactatacgacggtcggtgtctcaaaagccgctttagaatcgttaacccgttatctggcggttgagctgtctccgaaaaatatcatcgtaaacgcggtgtcaggcggagcgattgatacggacgcgctgaagcatttccctaacagagatgaactgctggaagatgcccgccaaaatacgccggccggcagaatggtcgaaattaaagatatgatcgatacggtggagtttttagtttcttcaaaagcggacatgatccgcggccagaccatcattattgacggcggacgttctctgcttgtataagttttaaaaaaagatgaatagccttatcatctcctgcgcattctaaagtgcgtggaggtgataacaatggcaaactcaaaatacagcaaaacagacgttcagcaggtgaaaaaacaaaaccagcaatcagcttccggtcagggtcaatacggcactgaattcggcagtgaaactgatgcgcagcaggttagaaagcaaaaccaatctgctgaacaaaacaaacagcaaaacagctaatcactgaaacgaaaaagcacttcatcttcggatggaagtgcttttttctgttgccaaaacgacaaaacttgtgattcctctacagaatgagtcaaagggttttccgacgtaaaatcgaaatggtaaggagtatcaacctaaaagcctaaggaggaacccgatgtcagagtttgaaaagcttgtaagtgaacagatgaaaatcatggatcagcttctcgagctgcagtcagaacttgaccgctgccggcaggtggaagcggaactcatcagtctggaaagagatgcaaagctggacaatgtacaggacgaaattgcgacaaagcgaaaagacctggccggcatacaggagttattccaaaggcagacagagcaagtcatccagtcttatcgcagcacggaaaagccgtcttcctatgtgcagaaatgaatgtgccattccggaagcggagtggttcttttattttcattttttaattcgtaacgttataatagtgaaaagacttgtcggaaagcaattgcggctgcattgactgcagggctttacagaaagtaggggagaaatatgggatatcccaaggaaggagaaaccattcaaattcacagctataagcataacgggctgcttcatcgaatttggaatgaaacgacgattttaaaaagtacggaattgtgtatcatcggagccaacgaccggacaatggtgacggaatccgacggacggacgtgggtgacgagagaaccggcgatctgctactttcatgcccgtcagtggtttaacgtcatcggaatgctgagagatgacggggtacactattattgcaacatcagctcgccgttcgcttatgacggagaggccatcaaatatattgattacgatttggatgtcaaggtgtttccggatatgacgtataacattcttgacgaggatgaatacgatgaccaccgcaaatcaatgaattaccctaaagagatcgacagcattctgaaggagtatctgaatacgctgctgcactggattcatcagcggaaaggaccgtttgctccggaatttgttgatatgtggtatgaacggtatctgcgctatacaaaataaagaatacaataaaaaacctgttggggtgtcaacaggtttttcacatgggctcacacgccttaaagagagagggggataaagtgtgggcgtaatcagacgctatatgcaatttgtaaaaccttataaaaaacaaatttttatcacagtgttaatcggcatcatcaaattctccatcccgctggctctcccgctgctgttaaaatacgtggtcgatgacattattcaagggagcggaacggcaagcgctaaaacatcatcgctattcacgatcatgggtatcatgttcgtgctgtttttaattctgcgtcccccggtagagtactatcggcaatatttcgcgcaatggacgggcagccgggtgctctatgatatcaggggagtattgtttgatcatattcaaaaattgagcctgaggttttatgccaacacgagaacgggcgaagtcatttcccgggtgataaatgatgtcgaacagacaaaagactttgtcataaccggactgatgaatatctggcttgatatgatgacggtgctgatcgtcatctgcattatgtttacactcgatgtcaagctgacattgatatctgtcattttgtttccgttatacggaatttcagtgaaatacttttacggccgcctccgaaaactgacacgtgagcgttctcaggcactcgcccaagttcagggacatttgcacgaacgagttcaggggatgcccgtcatcagaagttttgccattgaagattatgaacaagccaattttgatgaaaaaaacggacattttctggacagagcgatccgtcatacgaattggaacgcaaaaacgtttgcagtcgtgaataccattacggatttggcgccgctgctcgttatcgcgtttgcgggttattttgtcataaacggtccgctgacggtagggacgatggttgcgttcgtcggctatattgacagaatgtacaatccggtcagaagattgatcaactcatcgacgacgctgacccagtcgatcgcttcaatggaccgcatatttgaatttatcgacgagccgtatgaactgactgataaaccgaatgcagtaaaagctgacggcattaagggcgaagttgaattccgaaatgtctcgttccgttatgaggaaggaaaagaaacgattttgcaggatgtttccttaaaggtgacaaaaggggaaaccgtcgcgctcgtcgggatgagcggcggcggtaaatcgacgcttgtcagcctcataccgcgtttttatgatgtatccggcggcagcctgctgattgacggcacagatattcgcgattatgaagcgagaagcctccgcaatcaagtcggaatggtgcttcaggatacgtttctgttcagtgagacgattcgtgaaaatatcgccatcggtaaaccgggagcgtctctggatgaggtggttgcggctgcgaaagcggcaaatgcccatgaatttattatgaatttcccagaaggttatgaaaccaaagtcggcgaacggggcgtcaaattgtcaggcgggcagaaacagcggatttccatcgcgcgtgtattcttaaaaaatccgccgctgttaatcttggatgaagcgacatcggctcttgatcttgaaagtgaacactacattcaggaagcgatggaaaagcttgcgaaaaaccggacgacttttatcgtcgcccacaggctgtccacgattacgcacgcggataaaattgtcgtcatggaaaacggcgccgtcgtcgaaaccggcacgcacgaggaattaatggcccaaggcggccagtacagacacttatttacgattcagaatttgaactgatacaaaaacttatgccgtccgaatgggcggcataagtttttttgaatgcaaaaaaacccggttttacggaagcaccgggttactcttcgtctgtttctaattcgctgtctttcgggtggtatgtctgaaaactcgtaattaatgtatcgagatgctccagctgctcgcggtattccgcaaccgcagccataatgctgagcatattgtaatcaagcagttcatcctcgcagttctgctgatttttcaagaaagacttcgtcaaaagctgtttatatcttatgctttcttcagcatcgtcatcatgcggtttgatcttgccgaccgtccgcatcagaatcctttcatgccaatgaagcagataatcaatttcttctgtcagcgtctcctgaaattcctccggcatatgataaatctcgttttcatagcggtgcagctttttcagcgtatcaagcgcccgattcgccgtaataatcgcctgtctgaacaatacaagcttgcgcgactttacatacgtcgttttcttaaagtagcttctctcctctttataaagaaggtacgtatgatcaagcttcatcatcttttccttcagcttctcaatatcctctttcaatatcgagtgttccgtggactgacgcatcgtcagcctgatccatttcatgatctcatcggtatattcaaccgtatgatgagtcagcttcgtttcgtatttcggcggaagaaacacaaggttcacaataaaagaagacagcacgcctaaaataacggtgcttgttcgtatcagagcgaacgtcaggaagctgtttcccggtgtttctaaaattgcgataaccgtcacgagcgcaatcgaaatggtgtgttcaattttcagttttaacatgatcgtgatgacaatcactgcggtcaatccgatcataatcggactcggtccgaaaatcagtccgaatgccgtagcgatgacagcgccgatgatatttgcctgaacctgatcaataatgataagaaaagacctgtaaatagagggctgtatggcaaatatagctgcaatcccggcaaagatcggcgacggaagtccgatccatgatgctaagtagagtgcgagcgtaatcgcaatccctgttttaaaaatgcgggcaccaagtttcattggtttgtgcgtgcattcctttctctaataaattatgtgccgaacgaacggctgacacttacatttccctgtcggctgatttgctaaacaataaagtaatatacagggatcataccaattattcaaggtctttttttgaaaaaaccattatctcacaaatcggacaaaaagaaaaagcggaagccccgggctcccgcttgtttcagcagttattttttcatatgtctgaacgcatcttcaacggcctgtaaagtggcgtcgatatcctcttcagtatgtgcggttgtgataaaccaagcttcatacttcgatggagcgagattgatgccgcgctcaagcatcagcttgaagaacttggcgaatgcttctccgtccgtattttccgcctgctcgtaattgacgatcttttcatcagtgaagtaaaccgtgagcgcgccttttaaacggttgacggtgatggtaatgccgtgtgtctccgcatgggcgagaatgccttgctcaagtctggcgccgagctcatcaagccgctcataaacgccttcttccttcagcacttccaggcaggcgatgcctgataggatagatgccgggtttccggccattgtgccggcttgatatgccgggccgagcggagcaacctgctccatgatctcttttttgcctccgtaagcgccgatcggcaggccgcccccgataattttaccgagcgccgttaaatcaggcttcacttgaagaagatcctgcgcgcctccgtacataaaacggaacgccgtgatcacttcatcataaatgacgagcgcgcccgctttatgggtcaattcatttacctgttctaaaaatccttcttcaggttcaacgatgccgaagttgccgacgatcggctcgacgagaaccgctgcaatttctgaaccccatttatccagcgcggctttgtagctttcaatgtcattgaaaggaacggtaatcacctcattggcgatgcttttcggcacgccggcggaatcaggagtgccgagcgtagacggaccggaacccgcagcgacaagtacgagatcagaatggccgtgatagcagccggcgaatttaatgatttttgtccggcctgtataagcgcgtgcaacccggatcgttgtcattaccgcttcagtgcctgagtttacgaatcgtactttatcaagtgaaggaatggcctccttcagcattttggcgaaagtgacctcatgtttggtcggcgtcccgtacagcacgccgttttcagccgctgttttaatcgcttcagtaatatgcggatgggcatgtccggtaataatcgggccgtaagccgctaaataatcgatatactgattcccgtctacatcccagaaataagcgccgttcgctttttccatcgcaacgggtgaaccgccgcctaccgctttataggatctggacgggctgttcacgcctccgacgatatgctctaacgcttccttatgaagttcaactgattttgtatacaaaaaatgaccctcctaatatctccttacatcatgttctattgtagcatgcttcattgcgagcacaacggttcatgcttccagaaaagagcggggggataacggttgtaatcttaacgtgaattggatacgcttaataaaaaacccggaggtataagaaatgacgattgaaatcggacaaacagcaccggctatgaaattagtgaatgacagcggtgaagaagtagcattgacggattttaaagggaagtacgtcgttctctatttttatccgaaagacatgacacccggatgcacgacggaagcatgtgatttccgtgatcagcacgaaagtttcgcgggacttgatgccgttatcatcggagtaagccctgacagccgtgacaaacatgaaaaatttaagcaaaaacacgatcttcctttccagctcctcgttgatgatgagcacaaattggcggaagcttttgatgtgtggaagctgaagaagaattttgggaaagaatatatgggtatcgagcgatccacttttttgttagacaaagaaggccgtcttgtgaaggagtggagaaaggtaaaagtgaaagatcacgttgccgaggcgcttcgcgaattggaacaaattgcgtctaattaatggacaaatgctgaactcacggggttttcttcagattacatttgacaggagaccggaaaaagatgtacactaattataaacattataaagtaagaatcttttttagaagagaggtgcatgacggatggctgcacatgaattaaaagaagccttagacacgttgaaggatacgggagtccggattactcctcaacgtcatgccattctggaatatctcgtggattctatggcacatccgacagcggacgatatatataaagccttggaagggaaattccctaatatgagtgttgcgacagtgtataacaatttgcgtgtattccgggaagcggggcttgtaaaggaactgacgtacggagatgcgtccagcagatttgactttgtcacctctgaccattatcacgccatttgtgaaagctgcggaaaaatcgtagacttccattatcccgggcttgacgaagtagaacagcttgcggctcacgtcacggggtttaaggtaagccaccaccgtttggagatttacggcgtctgccaagaatgttccaaaaaagaaaaccactaaacgaagctgaccgctttgatacggtcagcttcgtttattttacactgttttttctgttataagactcatcgaacgctttgccttccaatcctttatccaatgtaagcggctctctgcaatgcatgcacatatccactctgcccagaatcttcgtttctttctcgcaagcggggcacatcacccggaccgcttttgtggacagcatgccgatccaaaaataaacggcggtgctgagcccgatcgacagcaggccgagaatcataaacaagctggcaagcaaaacagactgcttaaagaacagcccgatgtacataatgataaacccaacgaaaaccaaacttaacgcaaacgttctgatcttattaattttgcttgagtatttcgccatgtccatccccctctcgtttaactatagcacaaaacagatggcatattcttcatgttttcgtaagaaaagggaagaataaatatggcacctgaaaggaaatttgttataatagtgcaatgtgtttagaaaaaaggactttcatgttttatcatagaaatgtagaaacaatagctagtgaaacaatcgcattggaggaatcgtaatggacaatcttctccgtccaatttaccaagaaagagcaagtcatcccgatacgctggccgtccttatgattgagagaaggagtaaagcatcatccatcacggataactttgatgcggtcatgcttgtcattgtcaaacaggctgatgaacctctttttataaagcattatgaattcgaacaaaaaaccgcttctttacatattgtaacggatgctctgcttcaggaatggattctgcttgggaccaatagaagagtcatagattggatcatcaacggcaaagtgctgtttgaccgcaatgaatatatatctgaactcaatgaccggctcagcacttttcctttcgccgagcggaaattaaagatcggaatggaatacggcaagctgatcagaagatttgtagaaggaaaagcgttttttgaagctgatcattttctggatgcatattatgcggtagtgcatgctcttcaccacttggcccgcatagaagtgattgaccgggggttttatcccgaaacgacagtctggaaccaggtccgtcacattgagccgcaggtatataagctatattccgaacttgtcgagagtcacgaaagtttggagaaaagactcgaattattattcttagcaaatgattttctcatccattcaaaagctgaaatcggttctgcgcacctttttcaagtgatgaaagaaaaagaaatgtggcagtttggagaattgcttcagcaccctgaactggtgcacttcacccaagatcttggtgtcatgcttgattacctgacggaaaaaggctttgttgaagtatctcaaatagagaccaaagggcaggaagtatatcatcgaggatattctttcaaaaaaagtgttgacgctgaatcataggcatggtatattattaaacgtcgctgatgcgcttcaacaaaaagctcacagcggcggagaaataaaaataaaaaaacatttgacagcaactcgctgaaatgttatactaaaaaagtcgcctcgagatgaggttgaaatgatctttgaaaactaaacaagacaaaacgtacctgttaattcaaagttttaaataaatcgcacagcgatgtgcgtagtcagtcaaactactttatcggagagtttgatcctggctcaggacgaacgctggcggcgtgcctaatacatgcaagtcgagcggacagatgggagcttgctccctgatgttagcggcggacgggtgagtaacacgtgggtaacctgcctgtaagactgggataactccgggaaaccggggctaataccggatggttgtctgaaccgcatggttcagacataaaaggtggcttcggctaccacttacagatggacccgcggcgcattagctagttggtgaggtaacggctcaccaaggcgacgatgcgtagccgacctgagagggtgatcggccacactgggactgagacacggcccagactcctacgggaggcagcagtagggaatcttccgcaatggacgaaagtctgacggagcaacgccgcgtgagtgatgaaggttttcggatcgtaaagctctgttgttagggaagaacaagtgccgttcaaatagggcggcaccttgacggtacctaaccagaaagccacggctaactacgtgccagcagccgcggtaatacgtaggtggcaagcgttgtccggaattattgggcgtaaagggctcgcaggcggtttcttaagtctgatgtgaaagcccccggctcaaccggggagggtcattggaaataacaggcttatctcccccaagagtccacatcgacggggaggtttggcacctcgatgtcggctcatcgcatcctggggctgtagtcggtcccaagggttgggctgttcgcccattaaagcggtacgcgagctgggttcagaacgtcgtgagacagttcggtccctatccgtcgcgggcgcaggaaatttgagaggagctgtccttagtacgagaggaccgggatggacgcaccgctggtgtaccagttgttctgccaagggcatcgctgggtagctatgtgcggacgggataagtgctgaaagcatctaagcatgaagcccccctcaagatgagatttcccattccgcaaggaagtaagatccctgaaagatgatcaggttgataggtctgaggtggaagtgtggcgacacatggagctgacagatactaatcgatcgaggacttaaccaatttgaatgtatgcttactgttatctagttttgagagaacactctcaatggtttggtggcgatagcgaagaggtcacacccgttcccatgccgaacacggaagttaagctcttcagcgccgatggtagtcgggggtttccccctgtgagagtaggacgccgccaagcttttctaaaattttatcatcgcggggtggagcagttcggtagctcgtcgggctcataacccgaaggtcgcaggttcaaatcctgcccccgcaaccaaaaaaataaatggtccggtagttcagttggttagaatgcctgcctgtcacgcaggaggtcgcgggttcgagtcccgtccggaccgccatttttattgtaaacgaaacgatcatgttttcgttttttttgtgttttcttttaaatgctggcagcttggtatctaaccaagctttcttttatatcgttaaagtcttggatattgaaacataatccgatacactagaaagagctgtatttcacaagagcgtcagaaagggagacgggagatatatggatgagtttgatttgattcacagtattacgccgcattcgcattatcatccttccgtcgatgtagggatcggtgatgatggtgcggtttatacagcatcaccccatatgcagcaaattgtctgccttgatacaatggtggagaatgtccattttaaattagagtattcctctcctcatgatatcggttataaggcgcttgctgttaacattagtgacgtggcggcgatgggaggcattccgaagttttatttggtgtctctggcggttccttcttgctggcagaaagcggacgtccaggcaatgtatgaaggaatggcggaactggcgaaactatatcaaatggatttgatcgggggagataccgtctccgcttccggtcaagctgttattaccgttactgtcatcggagaaattgagaaggatcgcgcttgtctgcgaagctcggcaagacccggggatgttgtgtttgttacgggggatatcggttcgtctgcagcaggactgtctcttttgttgggagaaacacttccttctgcttttcacacgagtgattattttatccgaaaacataaacggcccgttccgagagttcaggtcggccgcttctgctctcagcttcagcgcacggctctgaatgatatcagtgacggattggccagtgagctgcatgaaatagctgcggcaagttcagttacgatagaaattgaagaacaacttctgccggtgcatccggatttgcctgagggagattctgagtggaagaaatgggtgttatttggcggtgaagattttgaattggttggaacggtttctcagcaagagtggacctctctgcttgattactgcactcaatcgggcattccgattgcgaagataggagcggtaactgaacggaaggaagcatgggttcttttgacagccaatgatcagagacaaatcgtccttgagaaaaaaggatacaatcattttaaataagacgggtgactcactttgaagacattacaatggagaacgaaaaaccccgaagaaacgaaagccgtagccaagcttgccgcttctttggcaaagccgggagacattttgacactggaaggcgacttaggcgcgggaaaaacgacttttacaaagggttttgccgaaggactgggaatcacgagggtggtaaacagcccgacttttacaattataaaagaataccatgacggttcgcttcctctatatcatatggatgtgtatcgtatggaggatgaaagcgaagacttagggcttgaagaatattttgagggacaaggcgtctgcttaattgaatgggctcatttaattcaggatcagctgcctgctgaacggctgcagatcgttatcacaagagccggtgatgaggcaagggacattacctttacggcttgcggaacacggtatgaaacgctttgtgaggagataaataaacatgacaatactggcaattgatacgtcaaattacacgttgggtgccgcgctcgttcgtgacaaaacggtgatggcggagtatattacatatttaaaaaagaatcattccgtgcgggccatgcctgctgtcaattcattgctgaaggattgcggcctaacaccgcaggaccttacgaaaatagcggtggcgaaaggaccgggttcgtacacaggtgtcagaatcggtgtgacgctggcaaaaacattggcatggtcgctgaagcttccggtttccgctgtctcgagtctggaggtgctggcggctaacggacggcactttcaaggactgatctgcccgttatttgatgcccggcgcggacaggtatatacgggactttatgaatatcaggacggccgattacaatccgttcttcctgatcagaatgtccttttgactgattggctcggcatgctgaaagaaaaagcgtctccggttttatttttagggcacgatacagccattcatgaagaaaccattctgcatgagctgacatctcaagcagtgattggaacggctgcacagcataatccgcggccgtcagagctggcgtttttaggcttggaaaaagaggaagcggatgtccacagccttgttccggattatttgcgtctggcagaggctgaagcgaaatggatggaatctcaaaaatagggtgatagggatgaaaacgaaaacggcgattcgaagcatgcgtccggaagatattgatcaaatttatgaaattgaaacagcatcctttacttctccgtggacgaaggattcattttatcatgagcttttggaaaatccgtatgctcactatcttgtcattgaaaaggacggctgtctggcggggtattgcggaatctggattattatagatgacgcgcagatcacgaacatagccattaagccggaatatcggggccaatcattgggagaagcgctgtttcgctctgcgatagaattgtgcagagaaaaaaaggcaagaaggctctctctcgaagtcagggtctcaaatcatcccgcccaatccttatataaaaaattcggtcttcaggccggaggaatcagaaaacaatactatacagataacggagaagatgcgttattaatgtgggtgacattacatgagtgaaaaacaagatatttatgtactaggaatcgaaacaagctgtgatgaaacagcagcctcagtcgtaaaaaacgggaatgaaattatttcaaacgttgtcgcttctcaaattgaaagccataaacgtttcggcggggtcgtgcctgaaatagcgtccagacatcatgtggagcagattacccttgtgattgaggaagctctttcaaaagcggagatgggctttgatgaccttgatgcgattgccgtaacggaaggacccggacttgtcggagccctgttaatcggagtcaatgcggcaaaggcgttaagctttgcccatcaaataccgttagtcggcgtccatcacatcgcgggccatatttatgcaaacaggctgataggagagcttcaattcccggcgcttgctttggttgtgtcaggcggacatacggaattggtttatatgaaagagcacggttcattcgaggttatcggtgaaacgctggatgatgccgcaggcgaagcttacgacaaagtggcaagaacgatggggcttccttatccgggagggccgcagattgataagctggctgctgtgggaacggattccattccgcttccgcgtgcgtggctggaagaagggtcttacaatttcagcttcagcggcctgaagtcagccgtgattaacacgcttcataacgcctcgcaaaaaaatgaggtgattcctccggaggatcttgccgcaagctttcagcagagtgtcattgatgtactgacggcaaaaacctctaaggccgcgaaagaatacggggttaaacaagtgctgctggcagggggcgtagccgctaacaaagggctgagagccgcactgcagcaggaattcagccattcgggagatcccgagcttgtcatcccgccgctttccttatgtacggacaatgcagcgatgattgcggctgccggaaccgttgcttttgaaaaggggattcggggctcatatgatatgaacggacagcccggtttggaattaacatcctttgatcgtctcacgttgtaaaacgtgaggctttttttacttattaacagataattctaacatatccacagcattgtgaatatattcagaaatccaggctggataaggggctgtaagttgttagtaaagtggataaagtcagaaaattttgtggatagtgtgtataacacgcttacttacatggctgacaaggaggatagctgtggataaaaaagcaccccttaaagaggtgcttgactttttctattcttctgaggagagttcctcccattctgctaataagttttcgagctcatgattcagagcttcattctccgcgtgaatggtctgtaccttttcatgatcctgatacacgtcaggatcgcacagcagctcctcattggcgctgattttctcttcggcggatgagacggctgcttcaatttcttcaatgcgtctcaggcgctgccgttctttcttcttccattctttttcttcctcgtaagttcttttcgtatcctgtttgaccttgccggcaggctgagcctgctccttttcctgccgcttcatttcttccagttccagctgctgggcttttttctcggtgtaatagtcatagtcacccaaatattcttctgcatgatccggagacagctccagcacccttgtggcgatcctgttaataaagtagcggtcatgcgatacaaataacagggttcccggatagtcgatcagggcgttttccagcacttctttactgtccagatcaaggtggtttgtcggttcatctaggatgagaaagtttgctttttgcagcatcagcttggcaagcgcgactcttgctttctcaccgccgcttagagaacggacaggtttcaggacatcgtctccgctgaacaggaagttgccgaggcatgtcctgatctctttttccggcatgtccggatattcatcccacagctcgtccagcacgcgtttggacgaggtcagttcagcctgctcctgatcataatagccgattgtgacattggaaccgtacgtgatcgatccggattcggggctgagcgtgttcataatggttttcagcaaggttgatttgccgattccgttcggtccgacgagggcggcgctttcgcctcttgtgatgccgaaggtcaggtttttcaagagcggcggctggccgtcatagctgatggaaacatcctgtacgcgcaggacgtcgtttccgctctgttttgtaatgtcaaaacggaaggcggctgatttttcatccccgagcggctttgccatgacgtccatccgttcaagctgttttcgtctgctttgggctcttttcgttgtagaagctctggccagattgcggtcgacaaaatcttgaagcttggcgatttcgtcctgctgtttttcatacagcttcaggtctttctcgtactgctcggctttttgttctaaataggcgctgtagttgccgaggtattttttgctttctgtccgtgagacctcgtacacttggctgacgactttatcaagaaagtatctgtcgtgggaaacgatcaggatggcgcctgaatatccctgtaaataatgctcaagccatgtaagcgtatcgatgtcgagatggttcgtcggttcatccagaataagcagatcaggctgggtcagcagcagctttccgagcgcaagccttgttttttgaccgccgctcaggctttgcactttcacggaatcgtcaaattttccgaagccgaggccgtgaaggatagatcggacatccgcttcatattgatagccgcctttatccttgaaatcctgctgaagcctgtcataggttttcatcagcgtctcaagctccgcgggggcggccgtggccatcttttcttcaatagagcgcatttctttttccattgctttcaggaaatcaaaaacgctcagcagttcttcttttatggtaagctgggattccaagcctgtgtgctgggcaagatatcccatcgttaattctttcggtttgattaattcacccttttcatatgaaaggtgacctgcgataattttaaggagagttgatttgccggctccgtttctgcctactatggcgatgcgatcccgagatctgacttcaagctttatattgtttaaaataggatcagcgccaaaagatttggatagctgattaatttgtaagatcatcatattatttcacctctgttataataagttaagtgtagcttatcaacctgctgtcagcaaacaatacatcagaattggaacattataggataagacatcagggagaaaatagtgtatgatcagaagtaaggagagtttaaatatgaatggattttctcattttaatgaagaaggccgtgcccgcatggtggatataagcgataaatcttcaacagtccgtactgccgctgcgatatccagcgtacacatgaagcatgacgtgtacagcagaatcaaaaaccgcgagatcggaaaaggagacgtgctggctgtcgcacaggtggcaggaattatggccgcaaagcagacgtcagcgattatcccgatgtgccacccgctttctttaagcagcgtcgacatttcattcggctgggaggaaaaggattccgaagccgttcttcatatacaggcaagcgtaaaaacgaaagggagtacaggtgtggaaatggaagcgctaacttccgcttcagtctgcgctttgaccgtttatgatatgtgcaaggcgctggataaaggaatggtcatcggcccgacctgcctcatggaaaagacaggaggcaaaaacggtgattttaaaagagatgcatctgagtataaagtggaggaccaatcatgaacaaggatcaatcaaaaattccacaggcgacggcaaaacggctgccgctttattatcgctttttaaagaatttacacgcgtcaggaaaacagcgcgtttcatcagctgaactgagcgacgcggtaaaagtcgattcggccacgatccgccgggatttttcctatttcggggcgctcggcaaaaaaggatacggctataatgtggattacctgctgtcatttttcagaaaaacactggatcaggatgaaacgacgaacgtcattttgatcggtgtcgggaatttagggacggcgtttcttcactataatttcacaaaaaataataacacaaaaatatctatggcttttgatgtgaatcagagtaaaataggaactgaggtaggcggtgtgcctgtctttgatcttaatgatttagagcttcacattaaggatgaacccgtggcgattcttaccgttcctgcggttgccgcccagtcaatcaccgaccggctcgtgtcgctcggaatcaaggggatccttaactttacgccggcccgtttgaatgtgccggatcacattcgaattcatcatatagatttagctgtagagcttcaatcattggtttatttcttgaagcattattctgttttggaagaaattgaatagcgaaaggaggagctgcacatgatcggtcctggaagcctggcggttatcggtgtggtagcggtgattattttcggtccgaagaagcttcccgaattaggaaaagcggcgggggacacgcttcgtgaatttaagaacgctactaagggattagccggtgaagaagaggaaaaaaagaaagaagaacagtaagataggatgacgcgtatgagagtgaatcaaatgacgcttgtggagcatattgccgaacttcggaaacgattgctgattgtggcgttatcctttacggttttctttattgccggcttttttctggcaaaacctatcattgtgtatcttcaaaaagccgatgaagtaaaagagctcacccttaatgcttttaacctgacggatccgctgtttatctttttgcagttcgcgtttatcatcggcatcattttgacttcgccgattattctctatcagatttgggcgtttgtcagcccgggtctgtatgagaaggagcgcaaagtaacactcagctatattccgatttcgatcgtgctgtttgtcggtggtgtgtcgttttcttattatattttatttccgctggtcgttgattttatgaagcgggtctcgaatgacctcgatgtcaaccaggtgatcgggatcaccgagtactttcattttctgctgcagctgacgattccgttcggactgctgtttcagatgccggtgctgatcatgtttttaacgagactcggtgtgatcacgccgatgtttttatcgaagatcaggaagtacgcgtattttgtgctgcttgtgatcgccgcgatgattgcgccgcctgagctgctgtctcacttgatgattaccattccgctttgcattttatacgaggtcagtatcctgatttcaaaagcggcgtatcggaaaaggcagaccagcagtgaatccgatcaggacgtatcagcataaaaaaagccatttctcaatgatgagaaatggcttttcttttatttttgattttttttcactttaaatgagaaagcgaacattttaaacgagatgctgatattataagcggcgaaaaccatcagcagtatggaataaaaagaccacatgcttcccggagagcttgcggccaaatacgtaaagatacagccgactgcgaaataaatcaagccccaagtcattgggttcctcatacaaacaatcctccaataattaattgcatttgctcactatgctgttcaatatatttttgggcggggccgagctgcatgaccacgacaatggtattcatcatgacatgggcgaatatcggcacaataatccgtttcgtctgcacatacaagaacgcaaaggtaaagcccatggccgtatacagcagcaggtgcgtgaggtcttgatgcacaatgccgaaaatgacggaactgatcagtccggcgataatgaaattcgttttttcatataatacaccgaaaatgatcttccggaaaatgatttcttcaagaatcggcccgacgatagaagaaacgataatcatgagcggcatggctttaataatgctgagaatggctttcgtgttttcggaaccgctgcccacatgaaagacatactgctcaatcatcccggcgattccctgagaaaataaagcgagccatattcccgcgaccgcccagagaacggacatgccggcggatgctttcttcccgtttcttaatgtctgcttcggcgcggttctcaaaatcaagagaacgataatcaggcagataaaaaagcttacgacggaataaatcccctgagccatggtgagattcgcattcgtagggtgcccgcccgcatagccgaatttgtacattaaaggaatgccgatcaatgcggaaagctgcatgataacatatgtcaaaatgatataccaatactgttttctcaaatgatatgtactcctttatcctataaaatcaacttatttgttcttattgtaacacaagtgaacttgacgtgaaaaaaggagaaaatcagtgcgagagagaatcatgtaagcgtgaaaattttttattcttatgacttgaaattggaagtgagattctttattataataactgtgttagcactctttagagctgagtgctaaaattacatattcatactattgaggaggttattacattgttaaagccattaggtgatcgcgttgtcattgaactcgtagaatctgaagaaaaaactgccagcggaatcgtattaccggattctgcaaaagaaaagccgcaagaaggcaaaatcgtggcagccggttcaggtcgcgtgttggaaagcggagagcgcgttgctttagaagtaaaagagggcgaccgcattatcttctcaaaatacgccggtactgaagtgaaatacgaaggtactgaatacttaatcttacgtgaaagcgacattttagctgtaatcggctaagcaaataaatatttttaaaaattcgaggaggtttcgttaacatggcaaaagatattaagtttagtgaagaagcacgccgcgctatgcttcgcggtgtcgatgcgcttgctgacgctgtaaaagtaactttagggccaaaaggacgcaacgtggttctggagaaaaaattcggttctccgttaattacaaatgacggtgtgacaatcgcaaaagaaattgaacttgaagacgcgtttgaaaacatgggtgcgaagcttgtagctgaagtagccagcaaaacaaacgacgttgccggtgacggtacaacgactgcaacagttcttgcgcaggctatgatccgtgaaggcctgaaaaacgtaactgcgggagctaaccctgtcggcgtgcgtaaaggtatggaacaagccgtaaccgttgcaatcgaaaacttaaaagaaatttctaagccgatcgaaggcaaagagtctatcgctcaggttgctgcgatctctgctgctgatgaggaagtcggaagccttatcgctgaagcaatggagcgcgtaggaaacgatggcgtcatcacaatcgaagagtctaaaggcttcacaactgagcttgaagttgtggaaggtatgcaattcgaccgcggatatgcatctccttacatggtgactgactctgataagatggaagcggttcttgataatccttacatcttaatcacagacaaaaaaatcacaaacattcaagaaatccttcctgtgcttgagcaagttgtacagcaaggcaaaccattgcttctgatcgctgaagatgttgaaggtgaagctcttgctacactcgttgtcaacaaacttcgcggcacattcaacgctgttgccgttaaagctcctggcttcggtgaccgccgtaaagcaatgcttgaagacatttccgttcttacaggcggagaagtgatcacagaagatttaggtcttgacctgaaatctactgaaatcggacaattgggacgcgcttctaaagttgtggtaacgaaagaaaacacaacaatcgtagaaggcgccggcgatactgaaaaaatcgctgcacgcgttaaccaaatccgcgctcaagtggaagaaacaacttctgaattcgacagagaaaaattacaagagcgtcttgcgaaacttgccggcggcgtagctgtcatcaaagtcggcgctgcgactgaaactgagctgaaagagcgtaaacttcgcatcgaagacgccctcaactcaactcgcgcagctgttgaagaaggtatcgtttccggcggtggtacagcgcttgtcaacgtatacaacaaagtcgctgcagttgaagcagaaggcgatgcgcaaacaggtatcaacatcgtgcttcgcgcgcttgaagagccgatccgtcaaatcgcgcacaatgctggtcttgaaggatctgtcatcgttgagcgcctcaaaaacgaaaaaatcggcgtaggcttcaacgctgcaactggcgaatgggtaaacatgatcgaaaaaggtatcgttgacccgacaaaagtgacgcgttctgctctgcaaaacgcagcttctgtagcagcaatgctcttaacaactgaagcggttgtcgctgacaaaccggaagaaaacgccggcggcgcaggaatgcctgacatgggcggcatgggcggtatgggcggaatgatgtaaaaaattatgatccctgtttggacataaggggttgccagatgtaatgccatacgaggtctctcacaagttcaatgaatttgtgaggggctttttttatttctatcattcatctcaaattacgaatgaatgatgctaatttatttaagttagcatcggctatagtacaagatactctcaattttccaaaaacagatttaataattcatttgaagcagttactaaggatgcagagtgctatttaaacaccaacaatcctgtctatctgaaatttaaacatcattttactgttaataattatacccaagaggatggtcaaacaattgcacaagcatttgcagattgccttaaagaaaaataaaatctgaataattaattcttcccaaaagtaatgcacattatgagggggcgcatatcattgtgatacagttaaagattatatataaggcagtattagtaattttaataagtgcctgtttattattgtttaatggatggtattttcataaatgtattattgatccgcattactaccaattaacagatttttcggaagaagatattcaaatttttgagcatttttataatattgatctaccttcaaacacgaagtttattaaagcagagcaatttgaaacaggggtaggtaattattctgcgattttgtacgtagcattacctgccaaaaaggtaaagcctttagtttctgactattcttatatgcctatcttttataacaataggtatacagtattttatggtgttaatattacaagcagcaataaggaaacagcacaaattacatttggagcagacgatagttcgctgaatggttctttatggagtaagcaagtaaggaatctcttagaatcgaaagggaagtatattggcgtttcagatgaaacttatgttatttctgcgtttttaattaacgtcgtttttattgcattacttgtttggatcttgaaaaagagcagaagaactagagtttgaattaagaaatatttgaactcaccagcataatgtagattaggaatacttaagggtatatcggacagaaagagttttcattgcacagatctttattaaataataacactaaaccaattttaaatgcagttcaagggtattagaatagtcttgtttaatagtatggaaggaaagagaaaggggaaacatgaggaacttatcatgctgttattcacattgtgttttctaccccatatccattgggcgcttggaaggacaccttggcaaaggttttatagatgatactatacttcaaattttaagcttcatttcacaaaaatcttaaatttgcattaatattataaatttctatcatacttattcatttctcggaagaaagatatggaaaaacctctgttttttttaggaaaatatgttattataattttggatttaaaatattaaaaagaaaagaggaattctaaagatgaaaaagttagtaatgaccctgtttacagcagtacttttgggagttgctattttcgcaggtgggtcagaagccttagctatggattcgaaaggtacaatcaaatttaaaacagatgctaatacatatacgaaaagtgctacttccattgtagttacgggtactttggctagggatttagataatggcttttcagtaattatcttaaataataaaggtaaagtatttgccagaaaagatatttcgcatagtattggttcacgtaattttcgtgtgagtttttcaacgaaaaatcttcctgcaggtaagtatgatgtgcaagttggacaggattggggaggaagatattggtcaggtgaactaaaacattatattacagtacagcattaatacggctgtataagtattaacctcttgttgttaaaaagtttaactttagaaatttgttttctgtgaaaaattaatttttcaatcaaggtatcttaatcaatttactgtactgataaagatacctttttatctttaaaaacaacaaggtcatgagtgtttttcaaagctcttaccgctagccgcaatgtatttgtcttttaaatgagaatatccatttgctccacctcaccccgaatcccaatcccaggctcccacgaatcaatcagacgaatcgccttttgattagcttctatcgctttcgtagtttctccttttcgatacaacagctgtgccattccgtaatgatagtaaatcagttcaacttgattggcgttgtgtttgtcatagagcatttgttcaaaggctttttccgctttttcgagttgatcacactttacgtaagccatgccgaggttgaaataggcttctatcgttttttcgccgccgtatgcggcgctggttgtgtttgctgcttcgtataatgtgatggcttcttcgtagtgagagcgggcgaaactcaggtcgccgcggaccagaagaaccctgtgccggataatgggcgagacgggctgatctttgatgccgtccagcattgctgccgctttgtccggttctccgatttttaacagcagcctcgattgcagggcggttccccatactttcaagtcgtcgtgatccggcgcgcctgattgttcgagtatcttcaggccggcttctatttgcccgagagctccgtctgaatcgttgacttccatcagcgcccagcctgccgtgtcgatccgaaagtaagcttcccgcgtgtgttcgcctgattgacgggcggcatcggcagcttttaatccgtattcgattcgcaggggcaggttgattctgcttagaaaatggctgatgcggatgatgagtttaatcaggatgtcatgttgtccggtttcgcccgaccattcgatgacctttaggatgttcggccattcctttttcatttgctctaaattccgtcccagcaagtagctccaatagacagaattgggctgttcccgctttatatgggtttccgcataatcaatataataatgcgcccagcggctgcgggcttcttttgcaaattcgtgattttcggataagtgctgttctccgtaagcgacaacggtttgatgggctgcgtattgaattctaccttcgtttcgttccggctgtattaaagcatatgaccgcatttgctcaatcgcgtaatgaaaccgccggacgtctaatccggccgcttgagccaagcttttctcatcagggggcttagcgaaaaagcaaagcgtctgccatagttttcgtgtgtcttcatgacatctgtcccatgtgcggccaaagagaacctcaaacaattccaataatgagtagcctgcttgtttaagttcttgaatgagctggggagcggggatatcgtcgtctgacatgtaagcgatgctcagtgccatggccttcgggttgccggcggctgccgagacgaattcattcttaaggtcaggtgatagctccaacagctgctccagcttttcccgtttttgcgggaggttgcatgtttgcagacagcggtgcacttcttgatggaaaaattcaagggcatctgtttgttcaaggccgcccagctggatggccgccagttccccgaggccgtcccggtatgtctgttttacgttttcccgtgccgtaaggaggacttttacgccttgcggaaggccgatgataaattcgtgaatgttacgttccgctgtatcaatgccgtcaacgatcagcaataccggtgtttcatttgaatgagcggctaatgcattgcggacgacaaaccgtttttcgttgatggatttgtcgatttgttctgcgcgtccgagctgataggcgatcgtgtttaaaaaatcgctgaagctcaatcctttccagtccgcgctgatccagatgatgctgttgaatgccggccaatctggtgaaccgccggcacaaaggtaggctgcttcaagagcgatcgttgttttccccatgccggcccagcctgtgattaaacagaccggtgactgggacagcatccattgccggattgcttccatatcaaagttgcgtccgataaagtttccggtccggcgtgacggtaagttatgcgtgacggagtttcttgtaagcgcattcgtttcgtggcttagtctgtcatgaaacagccgctttactgctttttcaacatcgtcatcactcggtgctccgaatgatccgtctttccggagtatttttgctttttttagacaagacgccgtccaaacgggcaatgcgggcttgataacgggaatcgtggtgttttccagaaggccggtcagccattcaggatccatgtcagtcttttctataatgatccagatcatgccgaacagctttccgtcgtcaattcgtccgggaatgtagtttgcgcccatctgtccgatccagcttttgatcgtgttagaggaaacgcctaatcggagtgcgatttgatctatataagactgccctgttttttcgttctttttccttctgactttataatcaggatgaagtttcagcgatttgacggcaggtgccagcagttctgcaaattgtgtccggttttcaagttcagccattagcctgcacctcctattagtactattttatcaattcagtgttttttgtatatgaaaaaataaaaagtacagtgccgctgtccttttatacagcaggaaaggctgttgaacgtatggaaaagcagataaaataggggcagtaatagagaaaacaaaaatgtatgcacttacatttcagagcagagaaaggattttgccaaatgactcacacagtgcctcaaaacatgaaagcggcggttatgcacaacacgagagaaatcaaaatcgaaacagtgcccgtgcctgaaatcaatcatgatgaagtgttgattaaggtgatggctgtcggaatttgcggatctgatctgcattactatacaaatggcagaataggcaattatgtagtggaaaaaccatttatcctcggtcatgaatgcgcgggagaaattgccgccgtcggattgtctgtcgatcaattcaaggtgggagaccgtgtcgccgtcgaacccggtgtcacatgcggacgctgtgaggcgtgcaaggaggggcgttataatctttgcccggatgtacagtttttggcgacaccgccggttgacggcgcgtttgtccaatatatcaaaatgcgccaggactttgttttttcgattccggattcactatcctatgaagatgcggctttgattgaaccgttttctgtcggcattcatgcggcctcgagaacgaagcttcagcccggttcaacggttgcgattatgggaatggggcctgtaggattaatggccgttgcggcagcgaaagcatacggggcaggcacaatcattgtgaccgacttggagccgctgcggttagaagctgcgaaaaaaatgggagcgactcatgtcatcaatgtccgggaacaggatgccggtgaagaaatcaaaacgatcacgaatggcagaggcgttgatgctgcctgggaaacagcggggaatccggcggcattgcaatccgcactggcttccgtgcgccggggcggaaaactggcgattgtcggtttgccttctcagaacgagattccgctcaatgtgccgtttattgcagataacgagattgatatatacggaatcttccgttatgcgaatacgtatccgaggggaattgaatttctcgcttccggcttagttgacacgaagcatcttgtaacggaccaatatccgctggagaagacgcaagaggcgatggaacgggcctttcaatacaaaaatgaatgcttaaaagtgatggtgtatccaaatcgctgagtgaacggggaggatctttgcattctccctcttgcctatcaaaaatgaaaacggattcttggggtgggaaatgatgattgaaacagaaaaagcagcggcagtaaagacgaaatatcgcggcctgtcctggatggaacggatcggctacggattcggcgatatgtcgtacaatattatctttcagtttgtaaacgcatacttgttattctactatacagacgtcggcggcattaagcctgcggtcatcgcagctttgtttcttatcgtaagggtgctggacgctgtttttgacccgattatgggcgtgattttagacaagacgaatacaagatggggaaaggcaaggccgtatcttttgtgggtggcgtttccttttgcgctatttacgttcttatgcttcacgacccctcatttcggcgaaacggggaatatggtttatgcgtacatcacttatattctgcttgggatgtccttcagcatgcagacgattccggtcaacagcttaacggggcggatgacgaattccgtggaggaacggacggttctgacgacgacccggatgattttagtttatatcggaattctgttatcgatttcctgtgcgacaccgcttgcggacgccatcggcgggaaagatcaggcgtttggatttcagatgacggcgcttatctatgcggcggtgagcatcgcattgaatctgttcagtttctttactgtgcgggaacggattcagcctgaaaaaagaaaaaaacaaggagtgaaaaagacgttgtctgttttgttccgaaacaagcctttgctcattttggtttctgcatttttggcgtttgcgattgggtttaacattaagctcagtacgatggtgtactattttacgtataacgtcagccataaggaatttgtgtttttaggaaccgtgttgtttttcggcgcagcgctgatcagcaatctgtttattcctttcttttctgagaagcggggccggaagcaggttatgatcatcacggcggtgctatcgctgatttcttatgcgggccttcagtttacatcgtattcttcgctgccgcttattttcttttggcttttcgtttcgggatttttcacgacgcctttaaatacgcttgcttggggaatggttgccgattgtgtcgattatgcggaatggaaaaccggagtccgggctgatggcgtggtgatctcgagcatgagtttcatcaataagctcggagttgcgttagccgggtcattttcggccgtttatctcggaatcgccggatatgccgcgaataccgatcagacggcctcgtcattgaatgcgattaaaaatatgaatgcgctcattccgggattgttcattctgctgtctattattcttatttctttttatcctttaactgaaaaaaaatatcagcagatgatgtctgatctggagcaaagggctgccagataagtatacgtaaaatttaaaatattctatgtaaacggttgtatttatgacagaaagcactatactgaaactataatcgagaattgataaatgagtgtgatgatgtgagaagccaatctgttatttgtattggagaattgttaattgatttcttttgtaccgatgtggatgttgatttgacgaaagggcgcaacttcttaaaaagtgccggcggcgcaccggcgaatgtgtcggcagcgattgctaagctgggcggagacgcggctttcagcgggaaaacaggcaaagatccgttcgggtattttctgaagcagacattggacgccgtacacgtcgatacctctatgctcgtcatggatgagaaagcgcctacaacgcttgcgtttgtttcattaaaacaaaatggggagcgcgactttgtgtttaacagaggagcggacgctttgtttacgctggatgatattgatctggaaaaggtaaacgatgccaaaatccttcatttcggatcagcgacggcattgttatctgatccgttttgctcagcctatttacggctgatgtcgattgcgaaagacaatggacagtttatttccttcgatcctaactaccgtgaggatttatggaagggaagagtttcagagtttataaataccgcaaaaaaagctattgccataagtgattttgtgaaagtcagtgacgaagagcttgagatcatcagcggtgcgaaggatcataaagaaggtgttgcggttcttcatgagctcggggccggtattgtggcggtgacactcgggaaaagcgggacccttctttcaaatgggaaggatattgacatcattccgagcattccggtgacatcaatagactcaacgggagcgggagatgcgtttgtcggcgcggcgctgtatcagctggcgcgcacggatgagattcagacggcagccgatgattttgcgaagctgcgtgatattgtctcatttgccaataaggtgggggcgctcgtgtgcaccaaaatcggtgcgatcgatgctttgccgagtttaaaagaggttgaagtatcactgtaaaatatcgaggatgcttcttgaaagtcatcggacttcgggaagcatcctctttatttaggtctgaaacccttttcgatatacggtatactttagaaaggcatccagtaaattgaaccgctgtgaagttcatacaataacttttttatcagttctgagtaaaaccaagtttctgctgctgccgtcatgtatagtgtgacggcctgtgatattgaaccgcggaggaatgtttttcatgaaacatgtttttcttattgtgcaatgcgcgttttctgttttttgttttctttgtctcgccgctgtcaattggtatcaggggagtgagcttgtttctgattcgtttgattggaattatacggctaaattttcaaagcttttgaatgggacggatacgattacaagtccggaacagatttcgcagctggatttctttgtgtatgcggcgaagcattacccgttagtgagcgggttgatgatcgcgctttttatttattttttgttctcactgtatctggtcgtaaagaatttccgccggcacaaatgggctgaatgagactattttcatataaaatacataaatttatgagaaaatgaaacttttttcgaaaaaaacagtatagataactatgaacttgttactatttaattttgggaggaaaatgaaaaatgagtattttaggaagatttaaagacatcatgtcaagcaatatcaatgcgctgctggacaaagctgaaaaccctgaaaaaatggttgatcaatatttgcggaatctgaacagtgatttaggaaaagtgaaagcggagacggcttctgtcatggctgaggaacagcgggcgaaaagagcgttaacagaatgccaggctgatgccgaaaagatggaaagttatgcgatgaaagcgttgcaggccggcaatgaagccgatgcgcggacgtttttggaaaggaaagcggctgttgaatcaagactgactgagctgcagacggcttatcagctcgcttcttccaacgcgtctcaaatgcgcaaaatgcatgacaagcttgtcgctgatatcggagagcttgagtcgcgccgaaatgccatcaaagcgaagtggtctgtggcaaagacgcaggagagaatgaacaaattggggtcctctgtgtcaaatgcgggccaatcgatgacagctttcggcagaatggaagacaaggtcaaccaagcgcttgatcatgccaatgcgatggctgagctgaacgcgtctccgaaagacgatattgacgatctgacggctaaatatgacagcaatcaaagcagtgtcgatgatgaattggcggcgcttaagcagaaaatgcttttcagtaaagatcaatagacagcgggctgcagctttgtccgatataaagagaaagtgagagaaacagaatgatcatttcttataaatgcccgaactgcggcgatgatatggtctttgacagttcatccggcatgctgacatgtcacagctgcgggcggcaggatcagattgagagcctgccaaaagagtatataacgacgagattttctgaaaatgaggcgaacgagtaccggtgtgagaattgcggtgcggtattaatgactgaggcggaaacgacggccacgacgtgcgggttttgcggaggagccgccgttctcgccgaccgattatcgggaaatctcgcgccttcgatggtgattccttttacgatcagtaaagaagaagccatgagcgcttttaaaaagtggtgccgaaacggccgtctgacaccgaaaggatttatgtctgctgatcgggtgaagagcataacgggcatgtacgtgccgttttggatgtttgatttaaacagcaaggttcaggtcaatgccgtttgtacgagagtgcatcactatgatgatggagaataccgggtgacggagaccgagtattacaacgcgtaccgcgatatcaatcttgattatctcaaaattccggtcgacgcttcagaaaaaatgagtgatgaattaatggacaaattggagccttactcatacagtgagctgaaggagtttaatacggcctatttagcgggatatatagcggaaaagtacaattataccgatgacgatctctttccgcgggcgaaggataaaatcagccattatattgattcttatatcagatccaccttctccggatatacgacggctgacattacggatgagcagattcagaccgataaaatcagcagcttttacgtactgcttccggtctggatggtcagctacgactatgagcgggctgagcacatttttgcgatgaacgggcagacgggcaaggttgtcggcaaaccgccgatcagtgccggaaaagtggccgcgtggttcggcggcataaccgccggtgcgtttttagcattaagactcgtctcacttatgataggaggcggtttttgatgaaagtatcgataaaaaaagcgtgtctcttctgcttcgtcctttttctgatgctgtcttttggtttacatacatcggcgtctgccgcggaacagaagcaatatgtttatgacaatgctcatttattaacgaaggatgaaacgaagaaacttgaggaattggccgggaagctcggggcaaagcgccataccgattttatcattcttaccgcaaacggaacgggcggtaaggacatcgagcagtacgccggtgatttttatgacagtcattttagcggaaacacggcgattttgaccattgatatgaaaaagcgggaagtatttatctccggatataaaaaggcggagacgtatttgaataacagccggctgaatacgatcagaaatacgatctcgtcagatatttccgcaggccattatgaaaaggcgtttcagacctacatcaagttggcttataaagatatggggaaaagcccggacgacaagtctgacaatctgctgctcacatggtggtttcagctcattattgccgcagccgcggccggcatcgccgtcactgtgatggtgtacaattccggcggcaaggtcaccgtcaccggcagcacgtatatggatcacgatacgtctgaagtgctgagccagcacgacacatatatccgaaccgacgttacaagagaaaaaaagcctgataaagataatgacaatgacggcggagtcacgaggggcggcacgagttacagcggaagcaagggaagtttttaaattatatgtaaaggatttgagcatacatgggttttttcagaaatcagttagcaaatgtggtggaatgggaagaattcagagatgacatggttttctataaatggaacaaccgtgaaattaaaaaaggcagccgtctgatcatccggccgggacaggatgccatctttttatacaacgggaagattgaagggattttccgtgatgacggcgattatgatatcgaatcagaaatcattccgtttctatctacactaaaagggtttaagtttggctttaacagcggcatgcgggctgaagtgctgtttgtgaatacgaaggagttcaccgtgaagtggggcacaaaaaacgctatcaacattccggcggcaggtatgccgggcggtatgccgatccgcgcaaacggcacatttaacttcaaggtcattgactacatcggattgattgataagattgcgggtgtcaaagacagctatttagtggaggacattaaaatccggattacgtctattctcgatcagcttttgatgaaatggatcaccagagaaggaaaagacatgttcaatctgcagtcgaattcctttgaaatcggaaaagggattcaagaagatcttgatatgcagctgatcggagacggcatgtcgattacgggcttcaatattatgagctttaattatccgcaggaagttcaggatatgattacgaaaaacgcttcttacggcatggtgggcgatgtgaaccgctatcagcagatttccatgacggacggaatgtcatccggcaaaatgagcggaagcggcgccgcctcagacatggcgggcatgatgatgggaatgaatgcggcaaatcaaatgatgaaccaaatgaaccaaaatcagcagaaccagccgcagcaaaatcaaagtcagcagaatcaggggacggcaccggcgaacggctcggaaggagcggctaagccgaaattttgtccgaactgcggaacgaaaacggaaggcgcgaatttttgcccgaattgcggacagaagcttgcctgacgatatacgaaaaagaggcctttttggggcctctttttttgtcatgatttcattgtttgaacgatgagggatgtcagcgctttagacccctcaggtatgagatggacgccgtccggtgtgaagtattcagggtgctgcaatgcttttgcgtgccaatcgacaagcgtcacatttttgcgagactcggcctgccggcgcaatgattcgtttactttgctttcccactgccgcggcacacgcgtgttgacaagatagatatcggcttttgaaaaagagctgatcagtgattcaatttggctgtttgtgaaatagccgttcgtccctaactcgatgatgaccgctttgttcggctgattaaatgacgcatattccgaagtgagctggagtgcttgagagacttgtcttcctacctttccgtcgatggtgacatgagggagggactgccgcaggtatgacgcaatgtccagcatcaccgagtcaccgatggccagcacgtcttgctgaggctgtgtttgttttggatcagccgttttttgggatgactgttcctttttctcttcgtttttctttgtgtttgatttgtctgttggttctttcttgtttttgtttgacgcggtgtccgttttttcgccgccgtgttttttcttgctgtcatcttcttttgccggttgatcgtgatcggccgttttgtgcgaagaggcggcggtttcttgctgatcattttgcgcgtacgtccattgcggctgttttttctcttcggctatccctgacagcccgcccgcaaatacgagaatggcggcaagaatgaggccgagcgacattctgctgatgacagaggatgtcttccattccagaaagcgattcagaaacacgcggcgtaaaaatggccggaagcccgcagtgcggatcggctgttcaatgaaatggtaagaaagctcggcaagaatgaaagtggcaccgattctgacggcgcagtgccaataaaccggatttccgatttcctgcacgggtgtgctcagtacgataaccgggtaatgccaaagatagattccgtatgatctcgttccgatccagcgaagcggcttccatgaaagaacatgtcccaaaaagctgctcggatggcataaacatgcgacaagaaccgctgcggtgatgctgatcaaaagcatgccgcccttgtacaggaagggttcatattcatccgtgtaaaagacgcaaagcagcagcgcggcaaaagcggcaagctccgtcccgtgaagcaggtgtttcatgctgctcggcagccgtttggaagataatcgtttcatcggccacactaaagctaaagcgcagccgatcagcaattcaaatgagcgggtatccgtcccgtaataaatgcggctcggatctccgccgggcacatacatcatactcattacgactgccgaacataacgcgagaaacatgaccgcggccgcaagccgggcccgtgttttacatatgtacattcccgcaagcagcaggaagggccatatgatataaaactgttcttcaatcgccagtgaccaaaggttttttaatggcgaaggggagccgaagctgtcgaaataagaaagctgatgaaagataaaccaccaattgcttatgtaaaaaagtgaggagaccgcatccccgcgtacggtatgcaggagctcgctgttaaacaatacgacccaaatgaccgtcgtgataatcatgagataagccgccggcagaagccgcctgatccggcgcacccaaaaatcacgcaaatcaagggtgatggcattgccttgggcaggcaatataatagatgtaattaaataccccgataaaacaaaaaagatatcaacaccgatgaaaccgccgtcggcccagttaaaattcagatgatatgcgataactgcgaggacggcaaaggcgcgaagtccatccagtccgggaatatagcggtgatgcagtgacttgtctgacatggtattcctccaataatgtgtgcggaaattctcgctgttttgcggatggctatggcagatttctgtacagtcttccatttgttccgttaattagacgcattcggaaggggattttgtttcagaaaaaatgaatgaaatgctgtgattttcttaaacttttcagcccccgtccggtgtctgttatatgaaaagggtcccatatgcatcttggctgttgcgggacgaaagaaaaaatccatgatctgcggatatcatggatttttttctttctttatctgatgtagcggtctccgacaagcagcttggagatgacggaggtcggtattgtaaactctgtaacgcccatatatccgggtgccgcttcatattcgtcaaatgaaataacaagtttgtgcttatctgtaatataaaaattctggtcggcgcggatggctttaaaaggctccgtcatatcatcatcttcgacccagtatattttattcggatcttctttcatctgttttttcatttgttctttaatattttcgctgatgactttaatataacggtcatctttaaataaactctttaacgtaagcacggcctcattctttttatcaatcgtgatgtaacggctttgcgtataagatgaagcttgtgttttttcgatatcacggcggattgagatcaaatccgctgtgtcagtaacggtttcataatcgctgtaaatactgaggtggccttttttgctttttgaggtcgccttcataaattcctgatacagctctttgctttctttcatataatgccgattgatgctgtcttcgagtttatgatcggaaagtccggacagagcgggcgttttcacatcaatgcttgattggttcttttcttccttcatctccgtgaatgtgatggcttggacgactttgccgatgacggggattttagacatggcttgtgcggcatccggattgatattgacaacggcggtaaataagacggccgcagcgactgccgcggatgtcggccacatcacgattcgttttttcttcggtttctgctgaagggctttttcgacaatgctgtccagttccttaggaatgggcacacttttatactcttctcttaattgttctaatctcttttccattaagaaagatcctccttcgtcagctgaatgcgcatgagcttcagccccctgtaaaggcgtgttttgacggtgttgatgttttcccccgtgatgtccgcgatttcttctaatttcaggtcttcaaagaaacgcagaatgataatggttttatattgatgcggcaggtcatcaagcgcttcgtgaaggtctgtgtctttgtagtgatcttcctttccgcggcttaaaaactcgatcgtttcatcgtccatcactttcagttttttctgtttgcggagaaaatcaatggccgtgcgcactaaaattttataaaaccagcttttgatcacatcggggtttttgacggattcgaccgatgtcagcgctttttgaattgattcttgaacaatatctaacgcgtcatccttgttctttacgtaactgtacgccagccggtaaaagtcttccttgcgctcagttatgcacgtcacaagcgacgctttggctgtttcgttcttcattgcttcaaagggctccttttttaaaaatacgtatcataggctgctgcctaaggatagacgggacagggtgaaaaatagtttgcgcagaggggatcatttttaaaaggaaaaggaaggaaagacgatgagatgaaaaaaagagccggaacggctctttttcggatgtgtctgttattcagctaaacgatttagttcggtttgactaagattttcacttggtttttctctttgattagagcgccgaagccttcttcaatcagatcgtcgagcacgatttttttcgtgacgagcttatctgctgagaagtagccctctttcatcagtgcaagaacggaagggaagatgtcacggtatccgataatgccttttacggtccgttctttgataacgatatcgttcggatgaatttccgctcctttttcccaaatgctgacgataaccgtttcaccggcaatgtttgttgactggatcgcctggcggagaacgacaggaacgcctgttacttcataagaaacatcaacgcctccgtttgtgcgtttagcgatttcttcaacgacatcgtccgtttttgacggatcaatgatgatagcgccgagttctttcgctttttcctgacgttccggtgaaagttcaaccgcgtaaatatctgtggcgccggccgctttcaaggcttcaatcacaagcagcccgatcggtccgcagccaaaaactgccgccttgtcgcccgcttttaatttgctttggcggacggcgtaaagcgctaccgctgacggctcaacaagtgcgccctgttcgtaagaaagctcttcaggaagcttaaacagcaattcttcgtcaacggatacatattcagaaaatccgccgccgcctccggctaagcctaagaatcccatttgttcatcaaggttataggctccctgatgtccgtgtgtggcaaaaatcggttccacgacgacacggtcgccgacgctgtaatttttgacgccttcgcccacttcaacgacttctcctgagaattcgtgacccatcgtgacgggcgccatttcgtttgttaacggatgaggtttgccgaccggaataaagatcgggcctcccaaatattcatgaaggtcgcttccgcaaatcccgcaccatttgactttaattttgactttacccggttctgctttaggttcatcaatgttttcgattcgaatgtctttttgattgtgccatcttgccgctttcattgattatcactcctagtctgattgaaacgagtataggtacatgatcaatatgaaccacggttaaaaggaataaagtgcctgcttcctaaagcctgatttctcaaaatatatcatattatgcaactatcaataggccttataaaaagtccatattgaatgcagaaatactctatgaatattataacgctaatgaattaaattttgtagtataatttaccatggaattatatagaacgggaaattgtgccatcgttatgtgcatgtctcatcacgttgtaatgaacatgtaaagtgattgaaatattataatcgtcttcttggtgtataattttgcctagaataaagaatcaggaggacgaaagcttgaagaagttattcttagccttattgattttagcaggaagcacgctgggagcgatcagttactcttctgatgcaagcgctaaaaaagtgaacggaaatattacatggtataatggagtcggtaaaaaaggatcttccggtaaaaaactgggacactgggattgcgcgacaaaattaggatttgacgttccgagaaacggaacgaaaatcagagcttatgcgaaagcaaaaccgaaaaaggttatcaccgtatacaaaaatgatgtaggccgtctgccgaatgccgtattggatgtcagcccgaaagcgttcaaagcgctcggatatccattaagcaaaggaagagtatccggacactacagctattaaaatagaccatcttaaaaagcaaggacactgattcttgctttttctgattgacggagagattgataatgaagaagaaacgatggatctggatgttgctggctgccgttttggcggcggcggtcatcgcgtccgttttactgattaaaggaaaaagcgacggcggcgggaaagccgttgtctccggcggccatgacaagctgcttgtttccattacagacaaagatctgatgacgaaatattacaaggacggccgcgtgctgtacgaggaaaagctttcggcatatccggcgtttgcgctggatgacgcccatcaggtgctctattttgtcgggaataatgaccaaaatgagatgcgtctctataagcttgatctgaagacgaaaaagaagacggtgctttataaaggaacggcaagcgctgacagtctgtttttatcaaaggatctgacgcacatttatttccgtctcggaaaagcggatgaagatattttccgtctcgcatcttttgatttgaaaacgaaacgttatgaaaatctgtatcccgccgccgatgagaaagatgacagtgtaagcagcttcttttataaccggagccaaaacgattttgcgcttctgcattattccgtaaaagaggattatcaaaaaacggatgaggcaaatgagaaggggattgaccctgaaccgacgaatatccggtttgcagcaggagcgggcgaacaccttcaggatttgacaaaccttgaacagtttatcagcgacgtggcggtgtcaccggacggaaagaaccttgtctttacatcttatacccaaaaagggacggaacaaaaagcgtccatccgtctgatgaatgtcaaaacgaaaaaagatgaaacgattatctcaaacgggaaggacttcgctccgctgattgatgcccagcctcagttttctaaagacggcagcatcatttatttcatggcggaagcaaaaggcgctaagcgcctgaaggatgaaacggggcggaatgcgaaggtccggaccatttatgcttatcatttggatacgaaaaaatgcgaaaaagtctgggaaaatgacaacggcattatcaacagtttttccgtcatccaatcatgaaaaaaacactcagcgcccgctgggtgttttttaatgaacaaagctggctgcggctgaggcgagccatttgaaaaaacggagaatcggaacggcaaaatgaagcgtttcgatgaatgactgtgcggcaaggttcattttccgccgttttgccatttccttcagatctttctgctgccgatcgtttttcatgttcattgctcctttgcatcataaaaggacatgatatcgcaaaggcctctcatgagacatggaggccttctctatgttgagactcgtaaaagggaggtctaacttgatgccgtttgattattgttttggagatttaccaacgaacggacgccgtcgatcattttactgccgcaaagggggcaagtcggggtatcactgccggcaaaattctttctgctccagccgatacagtcctcttttgtgcattcccacgtactgacatcttctttaggcagcggttcctgattacgtttgttgtagtaagacataaagtcacttcttcccttatgaattttcgtgcactccttcattgtctcatacttttccctaatctcctaattcctttttctatccagatttccaatgagggtgcatcgtcttcctgttattacagtatatgcaaataagtgtcttcttattttttctttttggataaataaaaaagccccttctctaaaaggggtgatatttgtttactgcttatccgtgacgtccatcggtctcatcatgtcgtaatcttcatgttctaaaatatggcagtgccatacgtagcgtccgctgtaaggagcgaaggtcgccgcgattctgatgacctctcccgagtgcgcctgcacggtatctttccagcctttctcacttggaggaggcgggacggcggggcctgtatacacaatgtcgccgaatttgttataacgctctaagtcaaaaggacgccggtcaaggatttggaaggaaacaaggtgcaagtgtatcggatgggttccccccatcggattaataatcgaccagatttccgttgtgccgagcttcggcgcttctgtcacaggatcatgccatcgcttgttattcagcgtcaaaacgggccggccgtatttgtcttgcgtatttgtaagtttaagcgtcctgatattgtgtattctctttgatgtcacattaggcattgttgaaagatatttaggcttccggcttgtgtctgctcccttcagcgcttttgtgacgcggaattgcatcacattggcgtctgtatccggatcggcgtcgcccccgcagccggtgccgttcgttaaaatgatatgttctccgtcaaaggcggagaaatcgatgagcacatcataccgctctgccggggctaagctgatagattgtgttttgacagagcggggaagcaacccgccgtcagaaccgatttggataaacttcccgccgttattgagcgagagagaaaatgttctcgtattggaggcattaaggatgcggaaacgatatgtccgcggttcaacttccatatacggccacgctttaccattgacgagaatggtatttccgcaaaaaaacgggacgatggaagggtcgggcagcgtttcagaaggggtagcaggcccgctcggataagacaaggaaccgtcgtcatttaacgtgcggtccaaaatcataagcggtacgtcgtactctccggagggaagcttcagctgcttttcttttcgctcgcggatgatatacatcccggcaagcccggcgtacacattgagcctcgtaatcgccatggcgtgatcgtgataccataacagagccccgcgctgtttgtttggataatggtatacctctctctcaaaataaggacccgtttccttaaaatcctttgtgaaccatgcttccgggtagccgtcgctgtccggcggcgttgctcctccgtgtaaatggacgacggttttgacatcgggttcctgatggccgctttctgaatggtgaatggtatgatccacgggcagaaaatgcttatccggaaggtcattcatccatttaatatagacgttttcatcttggttcacgtcgatcgtcgggccgggaaataaaccgttatacccccacagccgggtcggcgggagatcgcggtgcagcttgtgaaagcattccttcatggtgacttcataatacgtgctgccgtctgatttcttctgcggctggagtgtttcgataatcggcagttcatctgcaaatttttctagtgccatttttcatcctgtccttatcatttattgaaatcctgtactacagttaatgctgcctggaacaggttggttaaaaaaacacccgccctttttgaggggggtgtttgcggttattgcgcaatccggctttcggaggcgctctctttcggtttttgttttttgcggaatacataggaggcaagtaccagcagagtaataaatcctgtcagcagaaattcagaccgcattgaactgataaacagcatagataacaagatggcgcaaatggcgatgatcgtcaggtaggttaagtacggatagaaccacattttgattttaagagattcagggtttgtccgttcgattttctttctcattctcagatgtgagacggcgatgacgagatagacgagcagtgcgatcgcccctgatgaattgaccaggaacaaaaatacggagtcgggagaaaagtagttcataacaacggcaatataggagaaaaaggtgccggcgataatggcttgaaccggtacgcctcttttactcagtttcataaaacgccgcggcgcttcatttcgctctgccagtgaatacagcatccgtgacgtcgtataaagcccggagttcaggcaggacagaacggctgtcaggacgatgaaattcatgatttgagcggctgcgggaaccccgatatggctcaaaacggcaacgaaggggctttccaaaatattggctgaatcccacggcagcagtgtgaccacaaccgcaatggaaccgacgtaaaaaataatgatccgccaaacgactgagcgggtcgccttcgtgacggattcgaccggatttgacgtttctcccgctgcgattgcgacgatttcagatcccatgaaagaaaaaatgacaacgacgatgccgagcagaacggaacttggacctttagggaaaaatccgccgctgcccgccagattttccagcccgaccggtttgctgccggggacgattccgaaaatgaacgcaaatcccgcgattaagaagacaacgatcgtcgctaccttcactaaggaaagccagtattcaaattcgccgaacgatttaactgaataaatattcgtcagtgttaacagcacggtcagaagcagactcgtcagccataacggaatgcccgggaaccagtactgtatgattccggcgcctgcaatggcttcaatggcaatgacgatgacccagaaaaaccaatacagccatccgatcgtaaaaccggcccaaggaccgatggcgtcatgcgcgtactgtgaaaacgaaccgcttgtcgggttgacggaggacatttcccccagcattctcataataaaaatcactaataatcctgctaaagcgtaggagacaatcgctccgggtccggtggaatgaatgacggatccgcttccgacaaataatccggcgccgatcacgccggcaattgaaatcatagtcatatgccgggtttttaatccctttgataaagagttaggctgattcattctttgcctccttttggtttgtttatgctgaatattccgacaagtattattctatcataaatgccacaggcagttgaaaatgatgtaagaaaatatgacattttttctcgtccgtacagcagaaggtgccggaaggaaaagaaataattttctgttatttctgtgttttaatggttttgaaaataattccatgaacatgggttggcgagaatccttgatacgattgggatgagaggggttttgtgaatgaaaataagtttcctgagcgcataaatgttccatgcttactatttttctgtggaaagtgaatcatgtttctatagacccactgtgtcctcgctttgtatgataatgaaggaaaaattgaacgggaaggaggattttcagtggagagatatcatgaattgaaaaaaggcgaaaccggagcgattgtcagtattggcgcatatgcggcattgtcggctgtgaagcttgtgatcggttatttgtttcactcagaagcgcttcaggccgacggtttaaataatgcgactgatatcgtggcatccgcggctgttttcatcggtttgcgcatctctcagaaacctcctgacgaagatcatccttacggccattttcgggcggagaccgtcgcgtcactcattgcttccattattatgatgcttgtcggaatgcaagtgctgttcagcgccgcgcaatctattttttccgttaaagaggaaacaccggatatgatagccgcctggacggccgcggggagcgccgtggtgatgctgatggtctgccgctatacgaaagggcttgcgaaaaaggtaaacagccaggccctttcagctgcggccgctgataataaatcagatgcgctcgtcagtatcggcacgtttatcggaatttttgcttcacagttccatttggcttgggtggatacggttaccgcgtttatcatcgggctgatcatctgcaaaaccgcgtgggatatttttaaggaatcctctcattcgctgactgacggttttgatgtcaaacatatttctgattataaaaagacgattgaacagattgcgggcgtcagccgtttaaaagatattaaagcgagatatctgggcagctccgttcatattgatgtcgtcattgaagtgccgtcagatctgaacattaaagagagtcatgagatcgcaaatgaggtagaacgcaagatgaaagaggaacatgccattgaccattcacacgttcatatggagcctctccagctgaaataaagcttcctttctaaagggagctttttcctttttcagactggaaacaattcgctggaaacgtttttttatactgtttatattttgtggtaaagttaggttacgataattgaaatttgagagatgactaggaggagaagaatggcttataaagaagagctgcatccgctgctggagaaagccgttgagcatattgaaaacatcatcataggaaaacgggatatcgccatactcagtctggccgccattctcgcaaaagggcatgtgctgctggaagacgtgccgggagtcggaaaaacgatgatggtccgcgctttggccaagctgatcggagctgactttaagaggattcagttcacgccggatcttctgccgtcagatgtgacgggtgtctctatttataatacgaaaacgatggaatttgaataccgccctggaccgatcatggggaatatcgtgctggctgatgaaattaacagaacctctccgaaaacgcagtcttccctgcttgaggcaatggaggaagggaatgttacgattgacggaaagacaatgcggctggctgagccgtttttcgtcatggccacacaaaacccggttgaatatgaaggaacgtatccgcttcccgaagcccagcttgaccggtttttatttaagctgcgcatgggctatccgactgccgaggaagagcttcaagttctgtctttgcaggaagggcgcaatccgcttgaaacaatcgagcccgtcatttctaaagaacagtttatcagccttcagcaaaaattggagcaggtgcgggtggatgatggaattaaagcgtatatcgtcggcattactcagcatacccgccggcatccgtccgtacatctgggcgtaagtccgcgcggttcaatctcattaatgaaagccgcgcaggcgtacgcgctgcttcatgaccgcgattacgtcattcctgatgacgtccagtatttggctccgtatacgctgccgcacagaatgatcttgaccgccgaggcgaaatttaacgatgtgaccccggaagcggttatagaagacatcatgcaaacggaaaaagtccccgttcaaaggatgtcggtccgctaatgagaaagaagatgcattggcttctatatggctggaagctgcttatgttggccgtactgacggcggctgtcttttcttatgccatgtttcagggcggatttgtgagctggtttttattttatgcgtttttgccgtttaccgtttacgccgggctggtcgctgtgtacccgctgcgggcgtttcaggtgacgcgtgacgtgtcctctgcccagttaacctcaggcgacaggctgtctgtcaccatcaggctgacgaggcgcctgccgtttccgctgacatatatggtcattgaagatgtgatgccggaaacgcttggcgagaggcgcagtgcgaaacagctcgtgtttccgtggtttcaaaggaagctgacgttacaatatgagctgccgcaggtgccgcgcggagagcatcatttacatacgataagagtgcggacgggagatgttctcgggcttttggacaagacggcgtcgttttccgttacggatacggttctggttttcccggcgtacgggtctgttcactataagccgcaggtctcatccggagaagagggtgcggctgccggcgctccgtttcaggtacaccgctccgcaatggctgcgagcgtcagaaattatcagccgggcgaccggttttccgcacttgactggaaaacatcggcgcggcgaaatgagctgatgacgaaggaatttgacccgctgcagagtgtgaatatgattctccttttggactgcaggccgtccccatcgtttgaagccgcggtatcagcttcggcatccctgctttacacggcgcttgtgaagggctctcccgcaggatttatttcattggggagcgaccggaccgtatttcccgtccgggagggagaccggcatttcagaaagatgctgcgttacctggcatcagcttcagaatcggaagaagccgatgcaggcgggcgtttaggaaaagagctggcggatccgcgcgtccgcaaagcttccattgccgtcgtgacgggcagtcttacagaagaccttctcaaacaggctgagcccggccgtgctgacatgacggtgtttttggcgaaagaaacgaatgccgcgctttcggagaaagaacggaaactcgctctcatcttcgctcaaaaaaatattaaggtgcaaatgatcagggacaaacgggtgtcccatgttgtttagaaagagaggtggcgcgccatgccgcatgacgagaaccagggaagcaggctgagtctgctgctgttttattttctcgcttttttattgttatgggaatggctcaggccgctgcacaattttacagatacaaaacataccggttttttcatcgtttttatcggtttggcatttctgctgtcattcttccggatgaggtggtacgtcaccgtgccgtcctgcattctgtttacgttgatcagtattcacatcctgttttataaaggttcggtttttcagccggaatggctcgtttcttttttgcgggacgtgatgcaaaatgcccgccacatcgggaccggaagatggaatgatatgaatccgtcattccgcacattgctgttttttgtgcttttatggctgctcgtgtatttgctgcattactgggtgatctatcagcggaaaatattattcttttttatcatgacggtggcgtatatcaccgtgcttgatacgtttactccttatgatgccgcgtacgccgtcatccggatcgtctttatcggctttttgatgatggggcttttgtatatggagcgcatccggcttacggaacacatagcgtttaaaaaaagattgatactcaaatggtttctgccgctgatgctgtttatctgcgcttccgtcgtgttcggtctggcggctccgaaatcagacccgaactggccggaccccgtgccgtttcttaaaaaaataacaaaccacaaagaagtgcccgccgccgaaagcaaaatcggctacggcaatcatgatgaaacattgggcggcccttttcagcaggatgatacgccggttttcacatggaagggaaaagaacgggcgtacttccgggtggaaacgaaggatacatacacggggaaaggctgggtggagaccgatcagggcatgtcctataaactgaacggcggcaacgtggaagatatatggtttgaccggagtgtgcagacgagacggtatacggcacaggtgtccattgatgagaattatctctataatcacgtcatgtatccgatcggcgtctccaatattaaaccgaagcactcgattcagcttgaaatgaacggaaacaccgagcaaattacgccggtcagtgaacaagtgggcaacatccgcaatatgggacggtacacggtgacttttcaggcgcccgtctttaagctgaatgatctcagaaaagtgaaagtgaaacgataccgtgagcagaatcaattcaatgaccggtatttacaggtccccgacagccttccgaaaagagtgagacagcttgcggacagactgacgcgggatcatcataatatgttcgataaagcgaaggcgatcgaggattatctcggatcttccgcattttcgtataatacacaggatgtcgcggttccggagcacaatcaggattatgtcgatcaatttctgtttgaaacgaaaacaggatattgtgataacttttcatcggcaatggccgtgctgctccgctctgcgggaattcccgcccgttgggtgaagggctatacatccggcgaatataaaggggcaggcgaccataacggccacatttatgaagtcacaaacaacaacgcccattcgtgggtagaagtgtattttcccgatcagggctgggtgacgtttgagccgacgaaaggcttcaccaatccgacggagtttacgtcagagcaaaatcataccgcggcaaaagacagcggaggctcagcgggaaattcggatgaaccgtctgacaagcagcgtcaggaaacaaagccggaaaaagaggaaacaccgaaaaagcgggatcacagcgcggcaccgcagcctgtgatccgcaacaaaaccgcggcacagctatggtcgtatgcagccatcgtcatcgtgatttcagccgcggcggcactcgcctggctgctccggacgcgctggattccgcacgttacagcagccagattgaagcggcgtacggatgaagacgtctttttcgacgcatatgccgcgctgctccgccagctgaaacgaaaaggattcagcaggggagacggagaaacactgcgcgattttgctgcgaggattgacgaggcgcaccatacaaacgacatgtccgagctgacgctgctctatgagcgggccttataccgcagggataatgccgcaaagctttggaatgaatcgggacagttgtgggaaaatataattaaaacaagatagtcttgaccgcatatcgtcctgttgttagaataaatgaatgttaaatgggagcccgggagcgttaaaaagccgggcttccgtacaagtcttgcgcgacagagggctgaacgtttgtcctccgttttttctgtgtcaaaaacttagaggagattaggtgacaaccatgacgaagttagtgaatgaaatgattcttgttcttgatttcggcagtcagtataaccagctgattacccgccggatccgtgaatttggcgtatatagcgagctgcacccccatacgttgacagctgaggaaatcaaagaaatgaatccaaaaggaattatcctttcaggcggaccgaacagtgtatatgatgaaggatctttccgctgtgacgaaaaaatctttgaactcgatattcctgtattaggcatctgctacggcatgcagctgatgactcattatctcggaggaaaagtcgaggcggcaagccagcgcgaatacggaaaagcgaacattcagattcaaggaactcctgacttgttcaaagatcttccggaagaacaggttgtgtggatgagccacggcgatttggttgtagaagttcctgaaggcttcactgttgacgcaacaagccatcactgcccgaattcagcgatgagcaaagcggacaagaattggtacggcgttcagttccacccggaagtgcgccactctgaatacggcaatgatcttctgaaaaactttgtattcggcgtttgcgattgtgaaggcaaatggtcaatggaaaactttatcgaaatcgaaatgcaaaaaatccgcgaaacagtcggagacaagcaggttctatgcgcgctaagcggcggtgttgattcctctgttgtggctgctttgattcataaagcgatcggcgaccagctgacttgtattttcgtagatcacggccttctccgtaaaggcgaagcggaaggcgtcatgaaaacgttcagcgaaggctttaatatgaatgtcattaaagttgatgcgaaagacagattcttaaacaagctgaaaggtgtttctgatccagagcaaaaacgcaaaatcatcggcaacgaattcatttacgtgtttgatgatgaagcggacaagctgaaaggcatcgattatcttgcgcaaggaacgctttacacggatattatcgagagcggtactgcaacggcgcaaacgatcaaatcgcatcacaatgtcggcggacttcctgaagatatgcagtttgaactgatcgagccgctgaacacccttttcaaagacgaagtgcgcgcgctcggcacagagctcggccttccggatgatatcgtatggcgtcagccgttcccgggccctggacttggcatccgcgtactcggcgaagtaacggaagaaaaacttgagatcgttcgtgaatcagacgcgattcttcgtgaagaagtggcgaaccacggcctagagcgcgacatctggcagtacttcacggttcttcctgatatccgcagcgtaggcgtcatgggagatgcgagaacgtatgattacacaatcggtatccgtgccgtaacatcaattgacggcatgacatctgactgggcgcgtatcccttgggatgtgcttgaagtgatttcgacacggatcgtcaatgaagtgaaacacatcaaccgcgtcgtgtatgacattacgagcaagccgcctgcaacgattgagtgggaataaatgaagataaaaaaacgtctcttttaaaaaagaggcgtttttttttcatctttttgaaaccgttttgccctgattcatatctaacagcataggaggtggataaggtgaaggaagaacgattgatcaaaaaggcgaaaaaaggtgatgccgcagcctttgaaaaactgatcacagctcatcaggagactttatataaaacagcttatctctatttgcatcataaggaagatacactggacgctgttcaggaaacggcttacaaggcttttcttcatatcgcgcagctgaaggagccgaaatattttaaaacgtggctgatccggattttgcttcatacgatttttgcgatgaggaaaaagcacggagacgtcatcccgtttgagcagcaacacgatacacgcgcggagaataagaacattgaagaatacatagatcttcggaatgccctggaaacccttgacgaacatatacagctgaccattcagctttattattttcaagatttctcgattgctatgatcgctgaacagaccggtatggcggaaggcactgtaaaaacgcatctgcacagggcgagaaaagcattgaagcaggagctggaaaaggaggataaacatatatggaaaagcatcaaatgaagcaattgtatcaggacattgacgtgccgaaagctgaattgaaaaacgtgatacacagcgccgctgtccgtgccggaaaagaaggggccgtcagacggagatggggacgaaaagtgataaacggactcgcggttgctgctgctttgtttattctgtatctgtcctcaggtttattcatgccctccgttaatacggctatgggaaacatccctgttgccgggcagatttacagggtatttcaggataaggcaggttctgcgctgtttaaaagcaatttggtgacaaaactgaatgagaaagcggaatcacgcggaatcacggtgacagtgaaaagtgtgtattacgacagcggacagctcgtttacaattttaccgttgacaatttgaaatctaatgaggaggatattccttttgaagtagattataaagacagccggaatatattatctttggattatgacagtcagggcatgaaaaaagtgaaagacgggcagtacggggggcagcttcgcttttttgcggacggcccaaagatgaaagacggtgataagcttccgcttgtcattacacaaatcaaggatattcccggaaactggcgctttacactcccgattaaaaaacaaaagtccgtttctcttgaaggaacgaaagctgtgaatgtaaacgggttataccgctttttcgatatccgggcggaaaacggaacgacgggatcggctctcctgtattcagtcgactttcaagatgcagctaaaaatgatgccatctcgatttacgaggcatcagatgatgccggaaaccattatgaaatgacgatgtcgaatattgaacttggcagcagaaagaaccttcccggcggcgggaaaagaatacgcggccaaactcaattcagcaaaccgatagacccgaaagcgaaaacacttttcataacgggcgatgtaaaatcagaatcagagcctggagaaatcgtccctctgaaaacaaaactgcccgtcagttataaaacgaaacatcatcatgtcggcatcaccatcaaaaagatcaaacagcaaggcagacgggtaattgtcgattatcaattcagcggaattgatgtaagcaaaacggataaagatcagctgatgaatgtcggtgaatcaatcggtctcggcaatacgaaaaaaatgaaaacctggccatcgcttaatgagtataaaaaaggctattatctgaaaggaaataaggcgaaagtcacgaatcttaaaacgggtgaaatggaatccgtttttgaattagatgattcatccgataaagactattcgttgcgcgatttttcattcgattcatacgctttgtacgtcaatcaaacggttatgaacttgctggcggatgataaggggatcacattcgcggtgccggttcggcctgctgacggaaaatgatgtcgggaaggcggcttttgccgtcttccatttttggtcaattaacgaataaaccaaatttttttaacgggattgttcgtttttttattgagttttcaaaattgaattgatacaatagactcagaaatcaaatatgcagatatcgtataatggcggggatatggcccgcaagtttctaccaagctaccgtaaatggcttgactacggatcaatctcaatcgtttgatataaataatccattcttatttattcagactgaacgtatgtagtcaagcgtcccaaatgtatttggggcgttttttatttggcggataacgggcagaataaatgggagagaatgaaggaggcaattggcttgaagcaattttttcagtttgatgagctggggacaagctatcgtaatgaaatcatcggcggtttaacgacctttttgtcaatggcgtacattctgttcgtcaatccgctgacattgtctttaaacggtgtgaaaggatttcccgaagcattaaaaattgatcagggcgcggtgttcaccgctacagccttggcgtctgcggccggctgtattttaatggggctcattgcaaagtatccgatcgcgattgcgccgggtatgggattaaatgcgttttttgctttctctgtcgtactcggcatggggatttcatggcaggctgcgctttccggcgtcttgatttccggaattatcttcgtggcgctttcgctgacgggactgcgggaaaaaatcattaatgcgattccgcctgagctgaaattggcggtcggcgcgggtatcggtttgtttatcacatttgtcggtttgcagggttcgggcattattgaagcgaactcatcgactttggtgtctatcggcaatattcacagcggccctgtgctgctgacggttttcggtgttattgtgacggtcattctgatggtgcttcgcgtaaacggcggcgtatttatcggaatgcttctgacggcggttgccggcatggtctgcggactgattccggttccgacgcacattgtcggcagcgtgccgagtcttgcgccgactttcggacaggcgtggatgcatcttccggatatcttctccgtccaaatgctgattgtcattttaacgttcctgttcgtcgggtttttcgatacggccggaacgctggtggctgtagcgacacaggccgggctgatgaaggaaaacaaacttccgcgtgcgggaagagcgcttctggcggattcaacatcaatcgttatcggagccgtactcggtacgtccacaacgacttcttatgttgaatccagctcaggcgttgcggcgggggcgcgctccggcttcgcggctgttgtgacgggcattctctttttgctggcgatgtttttctcgccgcttctgtcagttgtcaccacgaatgtgacggctccggctttaattattgtcggcgcgctgatggtggcgccgctcgggaagatcgcctgggataaattcgaggtggctgtgccggcattcttaacgatgattatgatgccgctgacgtacagcattgcgacggggattgcgatcggttttatattctacccgattacaatgatctgcaaaggaaaaggaaaaagcgttcacccgattatgtacgggctgttcgtcatctttatcctgtatttcatcttcttgaaataacggaaaaaccggctgagttaagccggttttttgtttttgtcctattccgtaaaaccaatacatactataaaacgtcatgtgggtgtccgggtgaagaaaaccgcttgactgtttaaggacgcttcggtaccttatataagtgttttattttcttgtttaacaaattccgccgtatttttttgataggagttgctgacatgacggaagaaagaaaagaaacgttggaagaagaaaaacagcatcaggggactgatgaagaaccgctgtcgagaatgtccagaaatgcgggacgttatcaaaagcaaaagaaaaaagataaggaacggcgcccggctccggcttttacggaaaaactcgcttctgcatgggccgcggtcaaacgctattgccgtttcgcgctgcgcattttgacatcaccggtgaaggtcgttggggaagacggcttttcccgctttaaatatgctcttatttcaatgcttgtattcagtatctttttctcaatcggaaattggtttcagctgagggcaagccagcaaaggcctctcggatacggggagcggcatcatacgttttttgacggctttaccgtcgttctcgtgtatacgctcgtcttttttgccgctgcggccggcgcggtctggcttgtatcacgctatatgatgaaacagaaaatcacgatgcgggatgcggccgcgggggtcggatcgcttttggttccggctgtcgccagctctatcgtgtggatgattttcgcgatattgaatctgccggtcatcaccgtggtgtttacggcgctgaccttgtttctggccgcctcggcgatggtgcagtttgtgcagattctttacaaatcggctgaaaagcctgcggctgacgtgatgtactgtatttccgcggcggtcatcatcatgctcatttttacggctgtgacatggccgctcatttcagagtactttactgcttcgctgatccctttataagtcgaaatttgtctttcacaatgtttacaaatttttctaataaagcgtgttgttttgaagacccggccgagatatgatgagagcaacagcaattcgaaagcggcactactctttatgattcggaaagggatgatgaagatggccccgttgttgcgagaagccattaatcggaaaaaacagcatctgaggacaaagctgatccgctcagggttttaccaaaaccatgttcaggaactgtccggatacacgctgagtgagcttgagaaggaatatgaagccgtcaaacgattgaaaaaagccgagcttcactgataagagcttgaaagtctgccttgcggggcgggcttttttttcttttgaaaatgatcaaaagagggtaaactatccttaattgaaagattggcttttcaaattatcagaggagggggaatcaatgatgcagacgattttatccaacagtataggtatggttctcattattctcatcattaacattatatatgtctctttctttacgatcaggatgattctgacattaaagggacagcgctatttcgccgcgggcatcagtacgattgaaatccttgtgtatgtgaccggcctgagtctcgtgctcggcaatctgaatcaaattcaaaacgtcattgcctatgcactcggctacggcctcggcgtcatagtgggaatgaaaattgaagaaaaactggcgctcggctatattacagtcaacgtcattacgaaggagctcgatctggacctgccgaaacagctccgggaaaaaggatacggggttacaagctgggttgcgggcggacttgaaggagaccggaccgccatgcagatactgacaccgcgcaaatatgagcttcagctttatgatacgattaaaacgcttgatgaaaaagcgtttatgatcgcctttgagccgaaaacgatccatggcggattctgggtgaaagcagtgaagaagaggagaattaaggaatgacaaagccaaaaaagaaacggtttgaagtaacggaacatgaaacgattgacaccattctcactttaatgaaggaagagggctatatgcccgtccggcggatggaagagccgatctttacagaaaagaaagaaaatggatcaattcaagtcgttccttgcgggaaaaaaatcgtatttgaagggaaattgatctaaacacgaacattaaaagaaagaatttttatatcgttcgataatgtcgttgacattatccaagtccgttgttaagataaacatgaaatcaaaacacgacctcatataatcttgggaatatggcccataagtttctacccggctgccgtaaacggccggactatgcaggaaagtgataaacagctgacatggatatcgcagaagcgaacgactgacgatacgcgcgccatgcccggtttgtattgcttcctcatagttgcaatataagccgggcttttttttctgaaaaacaaagcatgagaaggtgggaacagaatgcagccgctagcaggaatcatcatgggaagcacctccgattgggagacaatgaaacatgcatgcgacatacttgacgaacttcacattccttatgaaaaacaggtggtatccgcgcaccggacgcctgatttgatgtttgaatatgcagaaagcgccagagacaggggtttaaaagtcattattgccggagccggaggagcggcgcatctgccgggaatgacggcggccaaaacgacgctgccggtgatcggcgtaccggttcagacaaaatcgcttaacgggcttgattctcttctgtctatcgtacagatgcccggcggcgtgccggtcgcgacgacggcgatcgggaaagcgggcgcagtgaacgcgggtctgttagccgcgcaaattttgtcggcatttgacgatgacattgcggataaactagaggcgagaagaaatgcgacaaaacaaacggtgctggaaagcagtgatcagcttgtctgataaaaaaactatttaccccggcgccgtcatcggcattatcggaggcggacagctcggaaaaatgatggctgtcgccgcaaaacagatgggctataaagtcgctgtcgtcgatcccgtgaaagactcgccatgcggacagatcgccgatattgagattaccgcccagtacaatgaccgtgaagcgattcataaattggccggagtcagtgacatcattacctacgaatttgaaaatatcgattacgaggcgcttaactggctcaaagaacatgcatatcttccccagggaagtgagctgctgctcatcacccaaaacagggaaacggaaaaaaaggcgatccagtcagcaggctgtcaagtcgcgccgtatcgtatcgtaaacagcggacgggagcttgaggaagccgttcaggcactggggctcccggcggtgctgaaaacatgccgcggcggatatgacggcaaaggccaatttgtcattaaggaagaaggacagacagatgaagcggctgcgctgttagaaaacggcacgtgcatacttgaaagctgggtatcgttccggatggagctttccgttatcgtgacgagatcggtgcacggtgagatttcaacctttccggctgctgaaaatatccacaaaaataatattctgttccaaagcatcgtacccgcgagagcggaggaaacggttcaaaagcgggcagaggcgcttgccgttcagctcgcggagaaattggaacttgtcgggccccttgcggtggaaatgttcgtcacggaagacggagaccttttgattaatgaactggctccgcgtcctcacaattcagggcattatacgctcgacctttgtgaaacgagccaattcgaacagcatatcagagcggtctgcggacttcctctcggcagaaccgatcttctcaaaccgggaatgatggtgaatctgctcggtgatgaagtgaagcttgcggaggagcatacggagcttttaaaggaagccaaactgtacctgtacggaaaacatgagattaaaaaaggccgcaaaatggggcatatgacatttttgcggaagcctgatgaaacatggattcaggacatcacgaacatatggatgaaaagagacggaggacgagcataatgatcgaacgttattcaagacctgaaatgtccgcgatctggacggacgaaaacagataccaggcatggctggaagtcgagattttagcctgtgaagcctgggctgagcttggcgtcattccgaaagaagacgtcaaagtcatgcgcgaaaacgcgtctttcgacatcaaccgcattttggaaatcgagcaggatacgcgccatgacgtcgttgcattcacccgcgcggtttcagaatcattaggcgaagaaagaaaatgggttcactacggcctgacgtcaacagatgtcgtggataccgctctttcctatctattaaaacaggcgaatgagatcttgctcaaggacattgagagatttgttgacattataaaagaaaaagcgaaagaacataaatacacggtcatgatgggccgcacgcacggcgtacacgcggaaccgacgacattcggcctgaaactcgcgctttggcacgaagaaatgaaacgcaaccttgaacgtttcaagcaggcaaaagaagggatcgaagtcgggaagctttccggcgcggtcggcacatatgcaaatattgatccgttcgtagaacagtatgtctgtgaaaaactcggcctgaaagcggcgccgatttccactcagacattacagcgcgaccgacatgcggattacatggcggcactggctttgatcgcgacgagcattgaaaaattcgcagtggaaatccgcggtctgcaaaagagtgaaacacgtgaagtggaagagttttttgcaaaaggacaaaaaggctcatcggctatgcctcataaacgcaatccgatcgggtcggaaaatatgacgggcatggcgcgcgtgatccgcgggtacatgctgacggcatacgaaaatgtaccgttatggcatgagcgtgatatttctcattcatcagctgagcgcatcattcttcctgacgcgacaatcgcgctgaattacatgctgaaccgattcagcaatatcgtcaaaaacttaacggtattcccggaaaatatgaaacgcaacatggaccgcacactcggtttgatctattctcagcgcgtgctgcttgctttaatcgacacgggtctgcctcgtgaagaagcatatgacacggttcagccgaaagcgatggaagcatgggaaaaacaagtgccgttccgccagcttgtcgaagcggaggaaaaaatcacgtcccgtctcacaccggaacagattgccgattgctttgactacaattatcatttgaaaaacgtcgacttgatctttgagcgtttaggtttatagaagaagccagccggaggcggcttcttcagctgccatagattgaatattcccaacattcgggttaggaggccttccgtgaatattgtgaacaataatcttctttatgaaggaaaagcgaaacggatttatcaaactgaagacgaacagattctccgcgtggtctacaaggattccgcaacagcctttaacggtgagaaaaaagcggagatcagcggaaagggccgtctgaacaatgaaatttcaagcctgattttcaaacatctgcacgccaaaggaattgacaaccactttgtggagcgtgtttcagaatcagagcagcttatcaaaaaagtgagcatcattccgcttgaagtcgtggtcagaaacattgccgccggaagcatgtcgaaacgtctcggcatcccggaaggaactgagcttccgcagccgattatcgaattttactacaaggatgacgcgctgggtgatccgctcatcacagaagatcatatctggctcttgaaagcagcggctcctgagcaggtggaaacgatcaaatcgattacaaaacaggtgaatcaagagctgcagcatatttttgaagactgcggcgtcagattaatagattttaagctggaattcggcttagacgcagagggacgggttcttttagcggatgaaatttctcctgacacgtgccgtctgtgggacaaagacacaaacgaaaagctcgataaagatttgttcagacggaacctgggaagcttaaccgacgcatatgaagagattttcaaaagactgggaggcatttcataatgtataaagtgaaagtttatgtcagcttaaaagaaagtgtgctcgatcctcaaggaagcgcggtgcagcatgcattgcacagtatgacctacaatgaagtgcaggatgtgcgcatcggaaaatacatggagctgacgattgaaaaatctgaccgcgatcttgacgcgctcgtgaaagaaatgtgtgaaaagcttcttgccaatacagtcattgaagactaccgatatgaagttgaggaggttgtcgcacagtgaaatttgcggtgattgtgttacccggctccaactgtgatattgatatgttccacgccgtaaaagacgaactcggcgaagaagtcgagtatgtctggcacgaggaaacaagccttgacggatttgacggcgtgctcatccccggcgggttttcatacggcgactacttgagatgcggcgccatcgccagattcgcaaacatcatgccggctgtgaaaaaagcggctgccgaaggaaaaccggttctcggcgtctgcaacggattccagattctgcaggagctcggacttctgcccggcgcgatgagacgcaacaaagatttaaagttcatctgccgaccggttgaattaatcgtgcagaacggcggcacgttattcacatcttcctatgaaaaaggacaatcgattacgattccggttgcccacggcgaaggcaatttctactgtgatgacgaaacgcttgaaagattaaaagaaaacaatcaaatcgccttcacatacggcggcgatattaacggaagcgtcagcggcattgccggcgtcgtgaatgagaaaggcaacgtattaggcatgatgcctcaccctgagcgcgcagtcgatgaactgctcggcagcgcagacggtcttacattgttccggtctatcgtgaaaaattggagggaaactcatgtcgctactgcttgaaccaagtaaagaacaaataaaagaagagaaactctatcagcaaatgggtgtcagtgatgacgagttcgcactcattgaatctattatcggaagattgccgaactacacggaaatcgggattttttccgtcatgtggtcagagcactgcagctataaaaactcaaaaccggttttacgtaaattcccgactagcggcgaacgcgtgctgcagggtcccggagaaggcgcgggaatcgttgacatcggtgacaatcaggcggtcgtgttcaaaattgaatctcataaccatccgtcagcgattgagccataccaaggtgctgcgacgggagtgggcggcatcatccgtgacgttttctcaatgggcgcccgtccgatagctgtattaaactctcttcgatttggtgagctcacttcacctcgtgtgaagtacttgtttgaagaagtagtggcgggaatcgcgggatacggaaactgtatcggaattccgacggtcggcggagaagtgcagtttgacgcaagctatgagggcaacccgcttgtcaatgcaatgtgcgtcggcttaattgatcataaagatattaaaaaaggccaggcgaaaggtgtcggcaacacggtcatgtacgtcggcgctaaaacgggccgcgacggcatacacggcgctactttcgcatcggaagaaatgtcagattcatctgaagaaaaacgttccgcggtgcaggtcggcgatcctttcatggaaaaacttctcctggaagcatgccttgaagtcatccaatgcgacgccttagtcggcattcaggatatgggggcggccggtctgacaagttcgagtgctgaaatggcaagcaaagccggctcaggcattgaaatgaaccttgatctcattccgcagcgggaaacaggtatgaccgcttacgaaatgatgctttctgagtctcaggaacgcatgcttctcgtcattgaacgcggacgtgaacaggaaattgtcgatatttttgataaatatgatcttgaagcggtttccgtaggtcatgttacggatgataaaatgctccgcctccgccataacggagaggttgtttgcgagcttccggtcgacgcgctggcggaagaagcacctgtataccacaagccgtcagcagaacccgcgtactaccgcgagtttcaggaaacggaagttcccgcgcctgaagtaaaagatgcgacagagacgctttttgccctgctgcagcagccgacaatcgccagcaaagagtgggtgtacgatcaatatgactacatggtgcgcacaaatacggtggtcgctccgggctctgacgcgggagtgctcagaatccgcggcacgaaaaaagcgctggcgatgacgacggattgtaacgcccgttatttatatcttgatccagaagaaggcggaaaaatcgccgttgccgaagcggcgcgcaacatcgtatgctccggcgccgaaccgcttgcggtcacggataatctgaatttcggaaacccggaaaaacctgaaattttctggcagatcgaaaaagcggccgacggcatcagcgaggcgtgcaatgttctcagcacacccgtcatcggcggaaacgtatcactttataatgaatcgaacggaacggcgatctacccgacgcctgttatcggcatggtcggcttaattgaagataccgctcatattacgacacagcatttcaaacaagcgggggatcttgtatacgtgatcggcgaaacaaaacctgagtttgccggaagcgaactgcaaaaaatgacagaaggccgcatttacggcaaagcgccgcaaatcgatcttgatatagagctgtcacgccaaaaagcattgcttgacgcgattaaaaaaggcttcgttcaatccgcgcatgacgtatcagaaggcggcttaggcgtagcgattgcagaaagcgtcatgacgacggaaaaccttggcgccaacgtgactgtagcaggagaagcggcattattattctctgaatctcaatcccgcttcgtcgtttcagtgaaaaaagaacaccaagaggcgtttgaagcggctgcggctgatgcggttcatatcggcgaggtaacggctgacggacttctggcgattcaaaaccaggacggacaacaattggttcacgcgcaaacgaaagaacttgagcgcgcgtggaaaggagctattccatgcttgctgaaatcaaaggcctgaatgaagaatgcggtgtgtttggcatctggggacatgaagaagctccgcagatcacatattacggcctgcacagcctccagcacagaggacaggaaggcgcgggaattgtcgcaactgacggtgaaaaactgacggcgcataaaggacaggggcttattaccgaggtttttcaaaacggcgaactgagcaaagtgaagggaaaaggcgcgatcgggcacgtccgttatgcgacggcaggcggaggcggatatgaaaatgtccagccgctcctgttccgttcgcaaaacaacggcagcctcgcgctcgcccataacggcaacttggtcaacgccacacagttgaagcagcagcttgaaaaccaagggagcatctttcagacttcctccgatacggaagtgctggctcatctgattaaacgcagcggacacttttcgctgaaggatcaaatcaaaaattcgctatctatgctgaaaggcgcttatgcctttttaatcatgactgaaacagaaatgatcgtagcgcttgacccgaacggactcagaccgctgtcaatcggcatgatgggcgatgcttacgtcgtcgcatcagaaacgtgcgcattcgatgtggtcggcgcgacataccttcgcgaggtagagccgggcgaaatgctgatcatcaatgatgaaggcatgaaatcagagcgtttctccatgaatatcaaccgttccatctgcagcatggagtacatttatttctcaagacctgacagcaatatcgacggcattaacgtgcacagcgcccggaaaaacctcgggaaaatgcttgcccaggagtccgcggttgaagcggatgtcgtcacaggcgtacctgattccagtatttctgcagccatcggctatgccgaggcaacgggcatcccgtacgaactcggtctcattaaaaaccgttatgtcggcagaacgtttatccagccgtcacaggctctccgtgagcaaggcgtgagaatgaagctgtccgccgtccgcggtgttgtcgaaggaaaacgggtcgtcatggttgatgattccatcgtgcgcgggacgacaagccgccggattgtcacaatgctcagagaagcgggagcgacagaggtgcacgtcaagatcagttcaccgccgatcgctcatccgtgcttctacggcatcgacacatcaacccatgaggagctgatcgcttcttctcattccgtggaagaaatccgccagatcatcggtgctgacacgctttctttcttaagtgtagacggattgttaaaaggagtcggccgaaaatttgaagacaccaattgcggacaatgcctcgcttgttttacgggcaaatatccgacggaaatttatcaggatacagtgcttcctcacgtaaaagaagcggtgctgacaaaataaaatgtgaaaatgacataaaggcagcgggaattcaggctgcctttctctttctgccttttaaggagaaacgaattgacaaggagtgatagggatgtctgatgcttataaaaatgccggagttgacatcgaagccggatacgaagccgtcaaacgaatgaaaaaacacgtggagcgcacgaaaaggctcggcgttatgggaagcctgggcggttttggcggaatgtttgatctgtcagagcttccgtatcaaaagcctgttttaatttccggaacagacggtgtcggcaccaagctgaaactcgcattttcaatggataagcatgacacgatcggcgtcgatgcggtcgcgatgtgtgtaaacgatgtgcttgcccaaggagcggagccgctgtttttccttgattatttggcggtcggcaaggctgatccggtaaaaattgagcagatcgttcagggcgtggcggacggatgcgagcagtcaggatcagcgcttatcggcggtgagacggcggaaatgccggggctgtatacggctgatgaatacgatattgcgggcttttcagtcggcgtcgcggaaaaagacgaaatcgtcaccggtgaacatattgaagaggggcatctcttaatcggacttacttcaagcggccttcacagcaacggattttccctagtgagaaaagtgcttcttgatgacggcggacttgatttggatactgtctatgaaccgtttgcgcgtcctctcggagaagaattgctggaaccgacgagaatatatgtgaagccggtgctcaaggcggtgaaaagcggtaaggtagacggcatggcgcatgtgacaggcggaggattcatcgagaacatcccgcggatgctgccggacggattgagcgcggaaattgatcacggatcatggccgatcccgccgatttttccgtttctgcaggagcacggcaagctgaaagaagaagaaatgttcaatgtctttaatatgggcatcggttttgtccttgccgttaaagaagaggacttgacagacgttatcgacacgcttgaagctcagggcgagaaggcttatctgatcggccgggtcaagcggggcgaaggcatttctttcggcggtgcggctctttcatgaaaaagtttgcggtatttgcttcaggaaacggatcgaacttcgaggccattgccaaacgcatgagagaagagaagtgggatgcggagctctcgcttctcgtgacggataagcctcaggcaaaggcggtggaaagggcggaggctttacacattccgtcattcgcctttgaaccgtcatcttttgaaaacaaagcggcctttgaacgggccgttattgaacagctgcgcctgcacggggcggaattaatcgttctcgccggctatatgagactgattggagatacgctgcttgaagcatacgggggccgcattattaatatacatccctcgcttcttccggcattccccgggattgacgctgtcggacaggcgtatcgggccggtgtgaaagtggcgggcattaccgttcattacgtcgacgaaggcatggacaccggaccgattatcgcgcaaaaagcattcgaaatacaggaaaacgatacgcttgaagacatagagcatacaatacacgagcttgagcacaaatggtatccgagcgttgtgaaacagctgctgggactaaataacagaggtgaaaaggcatgacaatcaaacgcgcactaatcagtgtttctgataaaacaaatctcgtacctttcgtaaaggaactgacagagctcggcgtcgaagtcatttcgaccggaggaacaaaaaaacttcttcaggaaaacggtgtggatgtcatcggcatttcagaagtgaccggatttcctgaaattatggacggacggttaaaaacgctccatcctaatattcacggcggactgcttgccgtaagagacaatgaagagcatatggcgcagatcaatgagcatggcattgcccccattgaccttgtggtcgtcaacctttacccgtttaaagaaacgatttcgaaagaagacgtaacatacgatgaagcgatagaaaacattgatatcggcggtcccggcatgctgcgcgccgcatcgaaaaaccatcaggatgtgacggtcatcacagatccggccgattacagctccgtgctcaatgagattaaagaacacggcggcgtttcgcttaaaagaaaacgcgagcttgcggccaaagtattccgccataccgcggcatacgacgcattaatcgctgattacttaacacgcgaggccggtgagaaagaccctgagcaattcaccgttacatttgagaaaaaacaatcgctccgctatggtgaaaaccctcaccaagaggctgttttctatcaaagcgcacttcccgtctccggttccatcgcggcggcaaaacagcttcacggcaaagagctttcttacaacaatattaaggacgcagatgcggccgttcaaatcgtccgggaatttacagaacccgcagctgttgccgttaaacatatgaacccgtgcggagtcggtacgggagcttcaattgaggaagcattcaataaagcgtatgaagctgataaaacctccattttcggcggcatcatcgcgctgaaccgtgaagttgatcaggcaacggctgaagcccttcacggcatctttttagaaatcattatcgccccttctttcagtgaagaagcgctgaacgtactgacggcgaagaaaaaccttcgtctgctcacgcttgacgtgtccgcatcagggaagaaagaaaaacagctgacatccgtacagggcggccttttgattcaagatttagacgtccatggatttgatgacgccgacatcagcatcccgacaaaaagagagccgagcgagcaggaatgggaggatttgaagctggcctggaaagtcgtcaaacatgtgaaatccaacgcgatcgttcttgcaaaagaccatatgacggtcggtgtgggagcggggcagatgaatcgcgtcggttcagctaaaatcgccattgagcaggccggagaaaaagcaaagggcagcgcgctcggatcagacgcgtttttcccgatgccggatacagtcgaagaagccgcaaaagccggtgtcacggcgattatccagccaggcggatcggtccgtgatgaagattcgattaaaaaagcggatgaatacggcatcgccatggtattcaccggcatcagacatttcaaacattaagagggggaacgaagcgtgaatgtattgattatcggaaaaggcggcagagagcatacattggcttggaaagcggcgcaaagcccgcttgttgacacggtgtacgccgcgcccggaaatgacggtatggcagactgcgcgacgctggtcaacattgaagaaagcgatcatgctgcactcattgcgtttgcgaaagaacatcatgtcggcctgacgattatcggccccgaagttcctctgattgaagggatagccgacgagtttgaaaaagccggactgcttgttttcggaccgtctgaaaaagcggcaatcattgaagggagcaaacagtttgccaaggatttaatgaaaaaatacagcattccgacggcggagtatgagacgtttacttcatttgaagaggcgaaagcatatgtgcagcaaaaaggcgcgccgattgtcattaaagcggacgggcttgccgccggaaaaggtgtcacggtcgcgatgacggaagaagaagcgattgaatgcctgcacgattttcttgaggatgagaaattcggggaggcgagcgcatctgttgtcattgaagagttcctcgccggcgaagaattttctttaatggcgtttgtaaaaggggagaccgtctatccgatggtaatcgctcaagatcataaacgcgccttcgatggagacaaagggccgaatacgggcggaatgggagcctactcaccagtgccgcacatttccgatgatatcgtcagaagcgcagtcgaaacgattgtgaagccggcggcaaaagcaatggtcaaagaggggcgttccttcacgggcgtgctgtacgcggggctgattctgacggaaaacggatcaaaagtcattgaattcaacgcgcgtttcggagatccggaaacacaggtcgtcgtgccgagaatggaatctgacctcattcaggtgctcttagatcttctgcatgagaaggatgttgacctaaggtggaaggatacggccgccgtcagcgttgtgctggcttctgaaggctatccggaaggctatgcgaaaggcactccgatcggcagtttgacgtccgctgaagacgggatcgccgtttttcatgccggaacgaaaaaagacggcggacaatttgttacaaacggcggccgggtcgccaatgtcacggcatttgctgagacatttgaagcggcgagagataaagtgtacagcgccgtttcagggctgacaaaacccagactgttttacagaagcgacatcggcgcccgtgcgctgaaagcatcgcagcgatgaagaggaaaaccccgcgttatgtaagatgcggggttttttacgtaagctgaggacgacctagactgtcggcttgccgtgtgacacgcagtcatcgatgaagtcctccggcgtatagacggattcttctcagactcgcgggacaggagaaattaaataacaagccgaaacggcttgttatttttcttgctgatggctgtcatcctgattcattccagcttggaacatatatgtcaccggacagaagcggaggatgccggatgccgctttcatcgcgcccatcatcatacagaagagatgcatcttgcaccaaggttttctcgtgtatttcgctgaagcagcagacaaaatggtgaggccgcaagtgatgcgcataacggcatttaataaactgatattcggtttcatcatttcagctcccttagaaaaagtttttcattcatcttcaataatttgtaacgttttagccgtgcgatatttgtgcggatgtgatacgatgggtctaatataagcgaaggagagtatgtgaatgtccgaacgtacctttaactggaaaaataaagacatcagatcacaggcggatgttgtagactcaaagctgcttccaacgctacttttacgggatgctctcgtattaaatccttttttaaaacaatggctgaaaaagaatgtctggatttatggagaccgaattgtatatgttggtcatgagcttcctgatgcagcagagcacattcataccataaattgtgaaggaaaatacattgtgccaggttacattgaaccgcatacacatccttttcaaatatataatccccaaacgctcgccgaatatgtgtctcaattcggaacaacgacgtttgttaatgataacttgttttttcttttgcacagcggtaaaaagaaagcgcttactatattagaggaactgaaaaaacagccggtgcaatacttctggtggtccagatatgatctgcagactgaagtgctgaatgaggatcagcttctttcttttgatgtccgcaagcaatggatggagcacccggatgtcattcaaggcggagaattgaccggatggccgcgcctcatggacggcgatgacttgatgcttcattgcatgcaggcgacaaagaaactgcgcaagcggatagaagggcattttcccggagcctctgaaaaaacactgacgaagatgaaactgttcggagcggattccgaccacgaggcgatgaatggcggcgaggtgatgagacggcttgaattgggctactatgtttcgctcagacattcatccatccgccctgatttgagaacgattttgcaggatctccatcaaaaaggcttccggcattatgatcatttcttctacacgacggatggagcgacgccgcttttttataaaggcggcatgacgaatgaattaatcaaaatcgctttggaggaaggagttccggcgatcgatgcctacaatatggcctcctttaatatcgcgaagtattatcagatggacgactttctcggtgtggtcggtccgggacggcttgcttcattgaacattctcgatgacccgatgaatccggacccggtcacggtgatctccaaaggcatcctgctgagggaagacggccgaaatatgaatgcgtttacagaaacggattggaaaaagggcggtcttgtccctcttgagctttcatatgatatgacgatggatgatttacagttttcaatgccgatgggtgtgaccatgcgcaacgcggtcattatggagccgtatatgattgcgattgataattctgttgaccagctttcttttgatcatgatgaatgctatctcacgcttctcgataagcatggaaaatggcgggtcaatacaatgctgaaaggttttgccgatcgggtgcagggctttgtcagttcctacacgacaaccggagatattatcgctgccggaaaaaataaagaagatatcctgctcgctttctcacggatgaaagaaatcggcggcggaatcgtgcttgccgaaaacgggaagattcttcatgagattcccctcgccttaaacggttctgcatccgcggagaagtatgaagaagtgcttgagaaagagcaaaaactgaggatgttgctggaggagcggggctaccgattctgcgatccgatctatacgctgctctttttgcagagcacacacctgccttatatccgcattacgccgagaggaatattcgacgtgatgaaaaaaactgtactctttccatcgataatgcgttaaaatataaaagcagggagccgacatatgaaaagatggaaaaccgtttgtatgctttgttttgcgtttttgctgcttgccgcctgccggcagaacaatgccgatcaggtgcagccgaaagaagcggaagctcctttaacggggctgaaaactgagcagaagcttgcagaacgccgtccgattgcagtcgcagtgaacaatcatccgaaggcgaggccccaatccgggctgtcaaaggcggatgttgtcatcgaagcgctcgcggagggccggattacgcggtttctcgcgatttttcaaagtgagatgccggaaacggtcgggcctgtgcggagcgcgagggaatattttgtcacgctcagcagcgggtttaacagcatatttgtccatcatggctggagtcccggcgcaaaaaagcagctggagtccggagcttacgattatataaacggtttggattttgacggaagcctgttttggagagccgatttcagcaagccgccccacaattcctacacgtcgtatgacaatatcaggaaggcggcggaacaaaaaggatacaagctgaacggaaaaacagaaccgctcccatttcagacatcagatgcaaaaccaggaaatgaaacctacaatattcggatagattatggaacacaaaacattacaaatcttgtcgaatacgattatgataaaaaagctgatgcttatacaagaagctctgatggtgtgaaagcgacagaccgggagaccggaaagcctttagccatgcacaacatttttattgttgaagccggccatcgcatgacagacaaagatggaaggcgggccatcgatattcagtcaggggggaagggcctcctgcttcagcacggcgatgttatagagtcagactgggaatataaagacggccgtattctgcccgtaaaaggcggtgagattcttccgtttgtgccaggaaagacatggattaatatcgtgcctgatctcgatgcagcttccattagtaaaggagaaggtgtttgacgatgcaaatcgataaattacgcggaaaagaactggaccagttatttttatctattttatcgctgaaagatctggaggaatgctatcgtttctttgacgatctttgtacgattaatgaaatccaatcgctggcgcagcgtttggaagtggcaagaatgctccgcgaaggaaatacgtatcacaaaatagaaagcgaaacgggtgcttccacagcgacgatttcccgggtgaagcgctgcttaaattatggtaacgacgcctatgaaatggcgcttgaccgcgtaaacaaaggagaatcctcctcagctacgtaaaaaaccgctctgccgatgacggcaggcggttttttttatgcgtgctgattcaaaaggccgggaagttccctcaggcttccgtcttcctcccggtatacgatgtgttcagctgaaaaatgaatcggcgagctgatgcccgccgcagcggcaaggtgaaacagcccttcacgcaatgagagcacgtagttgcagacgcggtgctgtttatcctcgatactgagcgcgcgctgaagttttgggtcggttgtcgccactccgacaggacaatgattggtgtggcatacttgagcgcggatacagccgactgaaaacatcattccccgggcaatattgacaaaatccgcgcctaacgcgagggcaacggcaatcttatccggagtgagcagctttccggatgcgaaaattttcagcttatctcttatcccgtatgtcttcaaaaggccgtcaacaaggggaaggccggtcagaatcggcaggccgacggaatccgccagctcatggaaagaagctcccgttcccccttcactgccgtcaatcgtaataaagtcgggaagtttgcctgatgaactcatacaggaaataaggtcttcaaggtctttgcggctgcccgggacaattttgataccgaccggtttttcgccgacagtccttaatttctcaatgaaatcaagcatgtccggaacatttgagaactcgttgaagcggtttgggctgtcaatggattgtccgggctgcacatttctgatggcggcaatttcttcggtcacctttgaaccgtcaatatgcccgcctcttgctttcgccccttgcgcaagctttaattcaaaggctttaatctgctcgaggcggctttttttcttaaattcttcccacgaaaattctccatcttcggtgcggacgccgaacaggccggggccgatttggcagataatatccgcgccgcctttcaggtgatactcagacaggccgccttcgcctgtattcatccatgtgccgccggcctggtgcagcccttttgacagggcggtgattgccctgtcgccaagtgagccgtagctcatcgctgattgtccgattaaccctttcacataaaacggctttttgcatgtgtcgcggccgatcacttgcacatcgtccggatgcaggtaataagggtccgcttttgctttttcgcggtgttcgctgcgtttcagcaggttgtctttgtcaatcttgtataccatcgtgtcgatcttcggcgtctgatctgcgcgcagctcctccctttgtttcgggaagagggcgttacggatataatagcccggctgattgaaatcccgttctgagccgaagcccatcattctgcttttatactttcccgacatgaccgtctgttcatattctctccgggaaaacggctgttcttcgttatcattgctgaataaatactgccgcagctcaggtccgattttttcaaatatatagcgcagttttcccgctacgggataattgcgcagcactgaatgttcttcctgcttttcgtctcttatgtatatccagagaaacagtgcggcgggaactaaaataataaaaatcaatatacaaatcagtacgataatggcttgttccattgagatcagactccttgtcttttttctctttgacattccacatattgtctgttttcaaacatagccgtttcccgtccggcggagcgcaatctttttttgtgaatcaggtgaatgacgtctttttccgtttttccgggccaaacgaatttgttataatgtttaaatggcaagaaacgaatggaggaacgaaaacgcatgtacgatgttaacgagtggaagcatgtttttaaactcgatccgaataaagatttaccggatgaacaactggaacagctttgtgaatcagggactgacgccattgtgatcggaggaagcgacaatatcaccgaggacaatgtgctgagactgatgtcaaaggtgcggcggtttttagtgccgtgcgtacttgaggtgtcgacgattgattccattgtgcccgggtttgatctttatttcattccgagtgtgctcaacagcaaaaaggcggactggattgtcggcatgcatcatcaggcgatgaaagaatacggagagctcatgtcaatggaggaaatcgtgacggagggctactgcattgtcaaccctgattgtaaggcggccgctttgacggaggcggatacacatatagaaacagaagatattctcgcctatgcgcgggttgcggaacatttgcttcatctcccgattttttatctggaatacagcgggatgctggcggacatagaaacggtggagaaaacgaaggctgtgctggacaagtccgtcctgttttacggaggcggcattaaagacgcggaaacggcggaacggttcggccgtcatgccgatgtcatcgttgtcggaaatgccgtatatgaagattttgatcaggcgcttaaaacggtggcggccgtaaagacaaagtagtcaagcggacgaaattgatttatgatagaacatatgtttgataggcggtgaacggatatgaattacattagcaatcaattattaagcggattaaatcccgttcagcaggaagcggtcaagacgacggacggtccgctgcttctgatggcgggcgcgggaagcggaaaaacacgtgtgctgacgcacagaatcgcatacttaatggcggaaaaacacgtggcgccatggaacattctggcgattacatttacaaataaagccgccagagaaatgaaggagcgggtggagagcattctcggacccggcgcggatgaaatctggatttccaccttccacagcatgtgcgtgcggattctgcgcagggatattgacagaatcggcatcaaccgaaatttctccattcttgatacggctgatcagctttccgttattaaagggattctgaaagagcggaatatcgatccgaaaaagtttgatccgagaagtattttaggctccatcagcagcgcaaaaaacgagctgatcgaacctgaggaattcgcaaaaacggccggcggctactacgatcaggtcacgagtgacgtgtataccgattatcagaaaaaactgctgaaaaaccaatcgctcgattttgatgatttaatcatgacgacgattaagcttttcgagcgtgtgccggaagtgcttgagttttatcagcgcaaattccagtacattcacgtagacgagtatcaggatacgaacagggcgcaatacctgcttgtgaagcagcttgcggcccgtcttgaaaatatctgcgtcgtcggtgactccgaccagtccatttacagatggcgcggggcggatatcgcgaatatcctttcctttgaaaaagattatccgagcgcaaacgtgattttgctcgagcaaaattaccgctcaacaaagcgtattctgcaagcggctaacgaagtgatcaaaaacaactcaaaccgcaagccgaaaaacctgtggacggaaaatgacgaaggcatcaagctttcttattacagcggcgacaatgaattcggcgaaggccaattcgtcgcgggcaaaatttatgagctgcacagctcgggccggcggaagctttccgatatcgcgattttataccggacaaacgcccagtcgcgcgtcattgaggaaacccttttaaaatccggactgaattacaatatcgtcggcggaaccaagttctacgacaggaaagaaattaaagacattctcgcatacctgcgccttgtgtcaaacccggacgacgacatcagttttacgcggatcgtcaatgtgccgaagcggggcgtcggcgcaacttcactagaaaaaatcgcttcatatgcggcgatgaacggaatgtcaatgttccaggcgatcaaacaggttgatttcatcggcgtcagcgcgaaagcggcaaacgcgcttgacggctttggcgcgatgattgaaaatctgacgaacatgcaggattacctgtccattacggaactcacggaagaaattctcgaaaaaacggaatacagagaaatgctgaaggccgaaaaatcaatcgaagcccaaagccgtcttgaaaatatcgacgagtttctttccgtgacgaaaaacttcgaacaaaaaagcgaagacaagtctctcgtcgcgtttctgactgatttggcgctgattgcggatattgaccagctcgaccagaaggaagaggaatcaggcggaaaggatgccgtcactttaatgacactgcacgccgctaaggggcttgaatttcctgtcgtgttcttaatgggcatggaagaaggcgtgttcccgcacagccgctccctgatggaagaagccgagatggaagaagaacgcaggctcgcatatgtaggcattacgagggcggaagaagaactgtatttaacgaatgccaaaatgcgcaccttattcggccgcaccaatatgaatccggaatcccgctttatcagggaaatacctggcgatttattggagaacctaaatgagaagaaaacacctcgcatgcagccgggaagaaaagtgcagccaaaacgcgggcccgtatcccgtcccgtttcctatgcgaacaaaacaggcggcgactcgctcagctgggcggtcggcgataaagcgggccataaaaaatggggcaccggaacggttgtcagcgtaaaaggagaaggcgaaagcaccgagcttgatatcgcattcccgagcccagtcggcgtgaagcgtctgcttgccgcttttgcgccgattgaaaagcagtaacctgaagaggaaaggaagaacatgatggacaaagaaacagcgaaacaccgggcagaagaattgcgccgcaccatcgatcagtacagttatgaatattacaccttagatgaaccgagcgtgccggattccgagtacgacagactgatgcaggagctgattgccatagaggaagagcacccggaactcagaacgcctgattcgcccacacagcgggtcgggggagcggtgcttgaatcgtttcaaaaggtgcagcatggcacgccgatgctcagtctcggcaacgcatttaacgatgatgacctccgcgattttgaccgccgcgtccgtcaggctgtcggtgacggcgtcgcttataatgtggagctgaaaatagacggtcttgctgtttctctccgttatgaagacggctatttcgtcagaggcgcgacaagaggagatggaacgacgggcgaagatatcacggaaaacttaaaaacgatccgcaacattccgttgaaaatgaaacggaatctttccatagaagtgcgcggagaggcgtacatgccgaaacagtcatttgaagcgctcaatgaagaacggctgaaacatgaagaggagccgttcgccaatccccggaacgcggctgcgggctcactcagacagctcgatccgaaaattgcggcgaaacgaaatcttgacatcttcgtctacagtatagcggagcttgacgagatgggtgtggaaacacagagtcagggcctggattttctggatgagctcggttttaaaacaaaccaggaacggaaaaaatgcgccacgatagatgaagtcattgaaatgatcgaagagctgcaggcgaagcgggccgatctcccgtatgaaattgacgggatcgtcatcaaagtcgactcgctcgaccagcaggaagagctcgggtatacggcaaaaagcccgcgctgggcgattgcttataaattcccggcggaagaggtcgtgacaaaactgctcgatatcgaactgaatgtcggaagaacgggcgtcattacgccgaccgccgttctggaaccggtaaaagtcgcgggaacgacggtctcaagagcatcccttcataacgaagatttaattaaagagaaggatatccgcattctcgataaagtggtcgtcaaaaaagcgggcgacatcatccctgaggtcgtcaatgtcttaatcgaacagcggaccggggaagaaaaagaattcaatatgccgaccagctgccctgagtgcgaaagcgaacttgtccgcattgaaggagaagtcgcgctgcgctgcatcaatccggaatgtccggcgcagatcagagaaggcctgattcactttgtctcacgcaacgcgatgaatattgacggactcggagaacgtgtcatcacacagcttttccgtgaacatctcgtccgtaatgtcgctgatttgtataagctgacgaaagagcaggtcatccggcttgagcggatgggggaaaaatcaactgacaatctgatcagctccatccaaaagtcgaaagagaattcgctggaacgcctgctgttcggtctcggcatccgttttatcggctcaaaagcggccaaaacactcgccatgcattttgaaagcctggaaaatctgaaacaagctacggaagaagagctgcttgcggtagatgaaatcggcgaaaagatggccgatgccgttatcacctatttccgcaaagaagaaatgcttgagctattgaatgaacttgaggaactcggtgtgaacacactctacaaaggcccgaaaaaagtaaaagcggaggacagcgactcttattttgccggcaaaaccatcgtgttaaccggaaagcttgaagagctgtccagaaatgaagccaaggcgcagattgaagcgctcggcggaaagctgacgggatctgtcagcaaaaaaacagacttgctgattgccggagaagcagccggaagcaagctgacaaaagcgcaggaattaaacattgaagtatggaatgaagcacagctattaggagagctaaagaaataagaggagtgttttctattgaaaaagatgttggcattggcggcgacggcaacggcggcagtactcatgctgtcggcctgttcgccgagtttcggggggaacaaagaggaagagatcacgcagaaaacggcaaagtcttctgaaaaagcgatcataccgaaatataatatctctgattcctactataaaatggtgcttccgtttaaggccggaaaagcgcgcggcctgaccgcggaccggctgaacacgaggctggacatcgatgaattcgagacgggtctgatgcggctcgctcaagacacgttcccgacggatgactatttgtatcaggaaggccagtatttagatgaggacacggtactcagctggcttgaccgcaaaaaagagggcagtgatctgaaaaaggcgaaaaaggcagatgccaattttcagaatctcggcttaaaccccgtgctgccaagctcgggatcggcaaaagagaaaaatgaaaacagcccgatttacttagcgtccatgcttgagcaggattacttagtaagaaaagataaaaattccattcagcttggcggtatcatgatcggtctcgctctcaattctgtatactattaccgtgaaaacacaggtgatccgcagcaggaagtggagctcagtgacaaaacgatccgcagccacggtgaagaaatcgcccaggaagtcgttaaccgccttcggaaaatggataacctgaaaaatgtgccgattaccgtcgccctttataaacaagcgccgaaaacatcaatcgtaccggggaattacattgcaaaaactgaagtcaaagccggctcatccaccatttcaaactgggatgatgtcaaagaaaagtacgtcttctatccggcggatacagacacggcaaagaaataccctgatgattccgaagtatttaaacgcttcaaaaacgccatcgacagctacttcccgaattacaccggagtcgtcggaacggcaatgtacgaaaacgatgaaatgagaaaaatgaagattgaaatcccgatgcaattttacgggaaaagcgaagtaatcgccttcacccaatacttaacaggtgagctgatggattattattcaaaaggctcagttgatgtcgaaattaacattacctcgtctgacgggcaggaagcgctgatcgtccgcaatgcgggtgacaaagaaccgaccgtccatatttacgattaaccaagatgcccttgttcatttctgtatgagcaagggttttttttattgtgatatcgttggagcgaggaaatgaggtatgttaagatatttgtataatcaggaattaacaggaaaacacatttcattctaagcggatgttactaatctgctgtgaaagaagaagggcaggaatgttgatgaatgacatttgctgagtacacacaccgcctacaaacgttatgaaaagggtgaatcagcatgcataaagatattaaagcgatttttgaggaagataaggtgctcgctgaagcaggtgaaatatacggctttaccaagtttcaatttattgcggacgccgagaactacgtatatgaaattgtgaaagataacgaaccttatattttaaaaattacgcatacgatcagaagaacaccggaatatattctcggagaaatggaatggcttcatcatctggcaaagggagggctttcagcagcaaagccgattccttcattaaatggcaaagatgtcgaagaagtgccggatggaaaaggcggagcgtttttagtaagagtctatgaaaaagcgcccggacgcaaagtggaggaatcagactggaacggaaccctgttttacgagcttggaaagtacacggggaacatgcaccggctgacgaaaagctaccgtctgagtgatccgttatataaaaggcaggaatgggatgaagaggagcagctgaagctgagaaaatacgtacccgcagatcagcatctcgtatttgagcgggcggatgctctaatggaaaaactgcgccgtttgccgaagaaccctgaaaactacggccttgtgcacgccgatctgcaccacggcaatttcaattgggacaacggaaaaatcactgcatttgattttgatgatatcggctacaattggtttgtgaatgatatcagtattctgctgtacaacatgttgtggtatccggtcatcccgtatgaagacaaggccgtgtttacgggtgaattcatgactcactttatgaaaggctacagggaagaaaatgaccttgaccccgcatggcttgaacacatcccggatttcctccggctgcgccatatgttgatctacggattattgcatcaggcgtttgacctcaattcactcggggacgaggaacttgagatgctgaaaaccttcaggcgcgatatcgaaaatgaaaccccgattacggagtataacttttctgcattcgtataaatagaaaaacgccggctgaatccagcccggcgttttttataacgtatcacacttcactccgacgacaccctgaatttctttaatatcataatagacgtcagtggtgtagcggtttttatgaacactgactttcacttccataatcggaaattctttttcgcccagatcatcaatccggacggagtgaatgcggagctgtttgcttttcatttcctttaaaatcttggtcattttgtctttatcggaaagagacattctcacgcggatatctttttccttcaagcggttgggaccgatttttctgatcagccacggaagaaattcgacgctgatcaggataaacaagaggcttgcgaacgcctctttataaaagccggcgcctgtagccagaccgagcccggctgcgccccagatgatggccgatgtcgtcaggccggatatgacgtcattgcttttacgcaggatcacgcccgcgccgataaaaccgacgccggaaatgatttgggcgggaaggcggagcggatccatcatgattcggtaatattttgggaaatgatatgccgcattaatgctgacgatcgtcagcatacaggagctgacggcgatgacgatacaggttttcagtccgagcggtttgtttttcagctcgcgttcaagaccgatgatcatgccgatcagcgtggcaatgcccagctttaataaaatctctggttcgataggccagctcaatttgcacagcacctccgcaatttttcttataataaattgatatgattttctcacagtatttatagcaggacaagtgcggaagaaaaaagccgtcagggataaaatctgacggctttttgtctatttcttgtttttcaaaagagcttccatccggctgaacagctgataagaagcatcggccggttttttggtcagcaggctgacggcaataccggcaatcagactgaggaagaaccccggaatgatttcgtatacgccggttgaagcggcaagccctgtcgtgatccagattaaaacggccgcggccccggtaatcatcgccgcaagcgctccccattcattcatccgtttccagtacagactgagcaagagcgccgggccgatagccgaaccgaagcctgcccacgcatatccgaccagatcaagaatggtgctgttcggattcatggaaagcaaaatggcgataacggccacgatcaataccgacaggcgtccggtcatgaccaattctttatcgctcgcttcccgtctgaaaaaggcgcggtataaatcttccgtaatggcgcttgccgttacgagaagctgtgaggaaatggaactcatgatcgccgctaaaatcgcggacagcaagaagcccgtaatcagcggatggaacaagattttagaaaaaataatgaaaatcgtttccggatcttttacggagaccccgaagtgatgagaatacgcaaccccgataatcccggtaagcaatgaaccgacaactgaaataaccatccagctcatcccgattctgcgggcgggttttaaatctttcacttctttaatcgccataaatcgtacgatgatatgaggctggccgtaatagccgagtccccatgccaaataagaaataatgctaatgacgctcgcgcctttaaagatatccaatagtttcgggttaacggcgttgatcgaatcaatcgtcgttgaaacgctcccgagctgggtaaaagcaacgatcggcacaagcactaatgccgcaaacatgatcgctccctgtacaaagtcagtcagactgacagcgaggaaaccgccaaacagcgtgtaaagcacaacaacaccggccgttaaaaacaaaccgaatttgtagtcggcgccgaatgccgattcaaataacctgcctccggataccatcccggacgatgtgtacagtgtgaaaaagatcataataatcacggcggaaacaattttcagcaatgatgacgagtggcggaaccgtttatcgaaaaaatcgggaatcgtaatcgcatcatccgcaacttccgtgtaagcgcgcagcctcggagcaagcagcagataatttgaatacgcgccgatcgtcaaaccgagcgccagccataaggtcgataaccccgttgcgaacattgcgccgggaactcccatcagcatccatgcgctcatatcggccgcacctgcggacagcgccgttacgaacgggccgagtcctcttccgcccagcatgtaatcattaatattcgttgtcttcctgaatgcgtaccagccgattaacagcatggcagcaaagtaaatgccaagagatataattagttcaatactcacgtttttggaccctctcttctttcatgtaaatgttgcatcacctctgtagattagtagtgccggaatatgcgccggcgatccagcctttagtcgtcattccatgcggatcgcatgatttagtgctggctatggttactaaacctaacaaagtatccccgatcaatcaactctcgaaacctggcccgctcaaggaaaaaatccccgccaacatagaacagcttagagatgaaaacgctaccaatagaatataaaagtaaaaattttctgacatataattcgtttctctttctccccgatttaggataaaatagagagggtttcatcatgcctcagaaggcggcgttttgttgctttagagggctcgtttttgatatgatcagtattatatgacgaaacggagaattatgcggaggtggatcttatgtcacgaatttctatagaagaagtaaagcatgtcgctcatttggcgagactcgccattacggatgaagaagctgaaatgttcacagaacagcttgacagcatcatctcgtttgccgaggagcttaatgaagtggacacggataacgtggaaccgacaacacacgtgctgaaaatgaaaaacgtaatgagagaagatgaagcgggtaaaggccttccggtcgaggatgtcatgaaaaatgctcccgatcataaagacggctatgtccgtgtgccatctattctggattaaaggagggagacagtatgtcattatttgatcacaaaatcacagaactgaaacaaatgatacataaaaaagaaatcaagatttccgatcttgttgatgaatcttacaaacggatcgcatccgtggatgataaggtgcaggcgtttttacagcttgatgaagaaagagcccgcgcttacgcgaaagaacttgacgaagcggttgacggacggtctgaacacggtcttctcttcggaatgccgatcggcgtcaaagacaacatcgtgaccaaagggcttcgcacaacatgctcaagcaaaatcctcgaaaacttcgatccgatttacgatgcgacggttgtggagcgccttcaagccgctgaagccgtaacgatcggaaagctgaatatggacgagttcgcgatgggttcttctactgaaaactccgcgtacaaagcgacgaaaaacccttggaatctcgatacggttcccggcggatcaagcggcggttccgcagctgcggttgccgcgggcgaagtgccgttttcactcggatctgatacgggcggctccatccgccagccggcttctttctgcggcgtcgtcggattaaagcctacatacggacgcgtgtcgcgttacggtttggtcgcttttgcgtcttcactggaccagatcgggccgatcacaagaaccgtagaagataacgcattcctgcttcaggcgatttcaggcccggacaaaatggactctacgagcgccaatgtcgaagtgccggactttctttcttcattaactggcgatattaaaggcttaaaaatcgccgtaccgaaagaatatctcggagaaggcgtcggcaaagaagcgaaagaatcggttttagccgctttaaaagtgcttgaagacctcggagcgacatgggaagaagtatctctgccgcacagcaaatacgcgcttgcgacgtattatctgctgtcttcttccgaagcgtctgcaaaccttgcgcgctttgacggcatccgctacggctaccgctcagacaatgcggacaacctgatcgacctttataaacaaacacgctctgaaggattcggcaatgaagtgaagcgccgcatcatgctcggcaccttcgcgctcagctccggctactatgacgcgtattacaaaaaagcgcaaaaagtgcgcacgcttattaagaaagattttgaagacgtatttgagaaatacgatgtcatcgtcggaccgacaacgccgacaccggcattcaaaatcggcgaaaaaaccagcgatccgctcacaatgtacgccaacgatattttaacgatccctgtcaacctcgcgggtgtgccgggaatcagcgtgccgtgcggatttgcggacggactgccgctcggactgcaaatcatcggaaaacacttcgatgaaggcactgtataccgcgtcgctcatgcttttgagcaggcaacagatcatcataaagcgaaacctgaactgtaaggggtgaaatgaagtgaactttgaaacggtaatcggacttgaagtccatgtggaattaaaaacaaaatctaaaattttctcaagctcaccgacgccattcggcgcggaagcgaatacccaaacgagcgtcatcgaccttggctatcccggcgtgctgcccgttttgaacaaagaagcggtcgaattcgcgatgaaagccgcaatggctttgaactgcgaaatcgcaacggatacgaagtttgaccggaaaaactatttctatcccgacaacccgaaggcatatcaaatttctcaatttgacaagccgatcggcgaaaacggatggatcgaaatcgaagtcggcggaaaaacgaaaaaaatcggcattacccgtcttcatcttgaagaagatgcgggaaaactgacgcatacgggcgacggctattccctcgttgacttcaaccgccagggcacgccgcttgtcgagattgtatctgagccggatatccgcacaccggaggaagcttacgcatatctcgaaaagctgaaatcaattatccaatacacaggtgtttccgactgtaaaatggaagaaggttcactgcgctgtgacgccaacatttccctccgtccgatcggccaggagaaattcggcacaaaaacggagctgaaaaacctgaactccttcgcgttcgtgcaaaaaggacttgagcatgaagaaaaacgccaagagcaggtgcttctgtcaggcggagtcattcagcaggagacgcgccgttacgatgaagcgacgaaaaaaaccattttgatgcgtgtcaaagaaggttcggacgactatcgctatttccctgagcctgaccttgtagagctctacattgatgacgaatggaaagaacgcgtaagagcaaccattcctgagcttccggacgagcgccgcaagcgttatatcgaagagctcggcctgcctgcttatgacgcaatggttctgacgctgacgaaagaaatggctgatttcttcgaagaaacggtcaataaaggcgcagaagccaagcaggcatcaaactggctgatgggtgaagtctcagcttacctgaacgccgaacaaaaagagcttgaggatgtcgcactgactcctgaaggccttgccggcatgattaagctgattgaaaaaggaaccatctcgtccaaaatcgcgaagaaagtctttaaagaattaattgaaaaaggcggcgacgcagaaaaaatcgtcaaagaaaaaggcctcgtgcagatttctgacgaaagcgtgcttctgaagctggtaacagatgcgcttgacagcaacccgcagtcaattgaagacttcaaaaacggaaaagaccgcgcgatcggcttccttgtcgggcagattatgaaagcctccaaaggacaggccaacccgccgatggtcaacaaaatcttacttgaagaaatcaaaaaacgataaaaaaaagcagccgcctctaagggcgctgctgacacggagaccggtaagcgccggtctcttttttttataagatgaaataggtttcaatggaagcccgcagcgtttcaatctgttcagttccgctgcctgccaagttggacagcattcctttaataattggttttcgcggctcttcctttgcgcattcctcttcaatgacttcaagcgatacgaggacgtcctcaggcagcccctgctgtgcttttatcttctgaatatccgcaagcagtctttctctgtccgccgcgggctgagtgaagatatcctcaggcagcagcggatcgggattgtctcttatcagtcccgtaatcagatcatcgattctggcaatcagaaaggccgccacgttttccgtccggaatgccgtatgttcattaaaaatcaagaaatgaatataggagctcacaattccttgcgccataacggacgcatccgctaaaaacggtgtgacggcatctccgtaaacggagagcaacgcatcccgatacagcatgttaaattgaatattggcctcatgaaaatactgtttgaccttttgattttcaggaatgaccttttcgctcagcaagagaatgataaagtccttgtgttccataaattcctggaattgatatgcgatttgttttcggaatacgtccttaggcggtttatgctgatgttctgttttgattttctttatttcttccatagacatgccgatgtaatactcacatgctgagagcaaaaggtcttcttttgatttgaaatggagatagaaggccccttttgaaattccgcattcaccggcgatttcctgaatggttgttgaagaaaacccttttttggcaaataaatggatgcctgtttttatgattttctcttttttttcgttcatgacgtgcttccccttaatcctgaaaaatttagaaaaatttactgccttattagttgacgatgttgagttataccgtttagtattatatagaatgaccagtcagtcaataaaaattaacggaggacatgatgaaccacattattaactttgtactgaagaacaaattcgcagtttggctgatgacgattatcgttactgtagcagggctgtatgccggtatgaatatgaagcaggaatccataccggacgtcaacatgccttacctttcagtaaatacgacttatcccggagctgctccgagtcaagttgcggatgacgtgacaaaaccgatcgagcaggcggtccagaatttagaaggagtgagcgtcgtaacgtccacatcctctgaaaacgtctcatcggttatgattgaatatgattacagcaaggatatggacaaggcgaaaaccgaagtcgctgaagcgctggacagtgtcagccttcctgacgacgcgaaaaaacctgacatttcccgttacagcctcaactctttcccgattttgacgctcagtgtgacaagcggtaaaagctcgcttgaagacctgaccaaaaatgtggaaaacactctcgttcctaagcttgaaggcattcagggcgttgcgtccgtgcaagtttccggacagcaggaagagcaggtggaattctctttcaaagacaaaaaaatgaaagagtacggacttgatgaagataccgtcaagaaagtgatccaaggctctgacgtcaatacgccgcttggattgtacacattcggcaacaaagaaaaatcagttgtcgttaacggagatattacgtcaattaaagatctgaaagatatgagaattccggtcacatcttcttctgccgctcaaggtcaagcgggcggagccggtgcggcatctgcggcggacgctcaggctatgcagcaggcacagcaaagcgcgtcagcaggggtgccgacagtcaagctttctgacattgccgacattaaagatgtgaaaaaagctgaatccatttcccgcacgaacggaaaggacagcatcggaattaatatcgtaaaagccaatgacgccaacacggtagaagtggccgatgcgattaaagatgaactgaatcaatacaaaaaagaccataaagggttcaagtacagctcgactcttgatatggcagagccgattacagagtcggtggatacgatgttaagcaaagcgattttcggcgcgatttttgcggtcgtgatcattctcttattcttaagagatattaaatcaacgatgatttctatcgtttccatcccgctgtcactgctgattgcgcttcttgtgctgaatcagcttgatgtcacattgaacataatgacgctcggtgcgatgacggtcgccatcggacgggtagtcgacgactcgatagtcgtgatcgaaaacatttaccgccgcatgaggctgaaagatgaacctttacgcgggaagcaattggtgcgtgaagcgacgaaagaaatgtttaaaccgatcatgtcatcaacgatcgtaaccattgccgtattcctgccgcttgccatggtcggcggacagatcggcgaactgtttatgccgtttgcattaacaatcgtcttcgcgcttgccgcatcgctgttgatttcgatcacactggtgccgatgcttgcgcacagcttattcaaaaaatcgctcacaggcgcgcctgttaaagcgaaagagcataagccgggcagattggccaatttctataaaaaagtgctgcattggtcattaagacataaatggattacatctatcatcgcggttctgatgcttgtcggcagtttgttcctcgtacctctgatcggcgcgagctacctgcctgcgcaagcggacaaaacgatgcagctcacatatacgcctgaaccgggcgaaacgaaaagcgaagctgaaaaagctgcgcaaaaagcggaagacatgctgcttaaacgcaaacatgtcgataccgttcagtattcattaggctcgcaaagtccgctcggcggaagctcaaacggcgcattgttctacgtgaaatacgaggatgacacgcctgattttgacaaagaaaaagacaatgtcttaaaagaaatcaaaaaaacatccagccgcggcgaatggaaatcacaaaatttcagctcgtcaggcaacaacaacgaattaacgtactatgtgtacggagattcagagtctgatattaaaggcacggtcaaagacatcgaaggcatcatgaaaaagcagaaggatctgaaagacgtcaactcaggcctttccagcacatatgatgagtacacgttcgtcgctgaccaggagaaactcagcaagcagggcctgacggcttcgcaaatctcccaagccctgatgtcccaaacgtcacagtctcctttgacaacggtgaaaaaggacggcaaagagcttgatgtgaacatcaaaacagaaaaagaccagtataagagtgtaaaagaattagaggataaaaccatcacatcgcctgcaggccaagaagtaaaaatcggcgatgtggcgaaagtgaaaaacggcacgacatccgataccatttccaaacgcgacggcaaagtgtacgctgacgtaacggcaaccgtcacttctgacaacgtcacgaaggtgtcatcagccgttcaaaagaaagttgacaaactggatcacccggacaatgtatcgattgataccggcggtgtatcagcggatattgctgattcctttacgaaactcggcttagcgatgcttgccgcaatcgccatcgtatacctcgttcttgtgatcacgttcggcggagcattagcgccgtttgcgattctgttctcgcttccgtttacagtcatcggcgcattagccggcctgtatgtatccggagagacgatcagtctgaatgccatgatcggtatgctgatgctgatcggaatcgtcgtcacaaacgcgattgtcttaattgaccgcgtcatccataaagaagcggaaggcttatcgacgagagaagcgctcctggaagccggctctacgagattgcgtccgattctgatgacggcgatcgcgacaatcggcgccctgcttccattggcattgggcttcgaaggcggcagccaggtcatttctaaaggactcggtgtcactgttatcggcggtttaatcagttcgactctgcttaccctgctgattgtgccgatcgtatatgaagtattagcgaaattccgtaagaaaaaacctggaacggaagaagagtaagacagcgggccttggctccttaaacggagccggggccttttttcttctggcaattcctgtacatattgttgcgattttctcaagtcatagtataattaaaggttgttagtgttaataatggatcggatactcttaagtaggatgatgagataatgaaacgtgcacgcataatatacaatccgacttcaggacgggagctttttaagaaaaatcttgcccaggtcctgcaaaaatttgaacaagccggttatgaaacctccacccatgccaccacatgcgcgggggatgccaccaacgccgcaaaagaagccgctttgcgggagtttgacctgattatcgcagccggcggagacggaacgattaatgaagtcgtcaacggccttgcaccgttagacaaacgcccgacactcggcatcattccggtcggcacgacaaatgacttcgccagagcgctgggcattccgagagagaatatactgaatgccgctgataccgtcattaacggcgtagcccgcccgatcgacatcggacaggtgaacggtcagtattttatcaacatcgccggcggaggccgtctgacggagctgacgtatgatgtgccaagcaaactgaaaacgatgctcggccagcttgcttattatttaaagggaatggaaatgctgccttcacttcgaccgacagaagtcgagattgaatatgacggcaagctgtttcaaggcgaaattatgctgtttttagtgacgctgaccaactcggtcggcggattcgagaagctggcccctgattccagcctgaatgacggcatgtttgatttgattattttgaaaaaagccaatctcgcggagtttatcagagtcgcgagcatggcgctcagaggcgatcatattaacgatcagcacattatttacacaaaagcgaaccgtgtgaaagtcaatgtatcagaaaagatgcagctgaacctggacggcgaatacggcggcatgctgccgggcgaattcgtgaacctgtaccggcatattcacgtcatcatgccgaaggagaaagcggaacagctggatgattaatacgcggacaaaatcctaaaacagtattcgttttaggattttgtcatcttttcagcgtgatcggaaacctttgaaggctgacattgaatttgaaggttttccagcacgctgaaacaaggctattggtaaaactagaggtgattatagatgaaaatgaaacccccgatagaaaaaaatgaatactatgatgtgacatttgaggatttgacgcacgaaggagcgggcgtcgcaaaggttcagggcttcccgattttcgtgccgaacgccctgcctgaggaaaaagcgcaaatcaaagtgacacgcgtcaaaaaaggcttcgctttcggccgcttgattgaactgaaagaagaaagcccgcacagaacggatgccccgtgtccgatctacaagcaatgcggaggctgccagcttcagcacatgacctatgaaggccagctcttgtttaaacagaaacaagtcaaagacgtcttagaacggatcggcaagctgaacctttcaaaagtcatcgtgcatccgacgctcggcatggaagacccgtggaactacagaaacaaagcgcaggtgccggtaggagaacgggaaggcggactcgtcgccggattctatcagcaaagaagccatgacatcatcgatatgagcgcctgcctgatccagcaatccaaaaacgacgaagccgtccaagccgtcaaagacatttgctcctcatacggcgttaaagcctacaacgaagaacgccacaaaggctggctccgccatatcatggtcagatacggcgtcgtcacgggcgaaatgatgattgtcttcatcacaagaacaagcgattttccgcaaaaagcgaaaatcatcgaagacatcacaacgcaattcccgcacgtcaaatccatcgtgcagaacatcaacccaaataaaacaaacgtgatctttgggaacgaaacaaacgtcatctggggcgaagaatacatctacgacctcatcggagacgtcaaattcgccatctccgccagatcgttctatcaggtcaacccggaacagacaaaagtgctctacgacaaagcgcttgagtacgcggagctgcaaggggaagaaaccgtcatcgacgcctactgcggcatcggaacgatttctctatttctggcgaagcaggcgaagaaagtatacggcgtcgaaatcgtgccggaagccatcgaggatgcaaaacgcaacgctgagctgaacggcatcacaaacgcagaattcgcagtcggagaagcggaaaccgtcattccgaaatggtatgaagaaggcatcacggccgacaccctcgtcgtcgacccgccaagaaaaggctgcgacgaagccctcctgcgcacaatcatcgacatgaaaccgaagcgagtggtgtacgtatcctgcaatccaggaacgcttgcaagagatttgcgggtgcttgaggatggcgggtatcagacgctcgaagtgcagcctgtggatatgttcccgcatacgaatcatgtggagtgtgtggctgtgctggaattaagagaaggcaactaacccttagggatggttgcctttttttaatccgcatttttttttgcattcaggacgaactcgtgacatgagaggagtaccagaagatgtttggttaacacctataatatagctttctatacatctctttatgtaatattcactctagaggggcagcttttttaatacactttcatatcttgttttttctccttactaatcattactttttctaaataactcttaagaaatacattatctatcctgtctggaatgtaacccagacgtttatttagtatattctctatgatatacattttctttgtgtaatattggtaactatccgttgcgatttgaacactttctgattcatttcccttttctgattcaagtcgagatttatatagctgatcatacttctgtttgcgtatttttcttgagagccgcagtaaatgaaataattcaattgttggcagagtcattagttctggtgtagacttatccaaatctaattcagaagtatgctcacgatattctatgatttcccgtttgccatctctctgaacattatgtatgtacattaagcaaaaactacagtaatactgattatccttttgaattgaagttgcacaataagggcatgtttccattacgttctcctttctgaatattctaagataatatgtatttcggttacaaacaagaattttaaatagtattagaggttcttaaccaataaaaaccctttttatgataaagggtttattgattacagcatgtataagtttcatgcaaaatcaataagtaatccctatgtatagaaaatccaccgagcctaaacccaataacaaaacgcgaaaataataaattatatcgttataattatttataaaaagataataaagttggataaaaatgaggaaaatcctggcgggaatgacgatataaagttagtgaacaacggtatagaatcttacttttcgaggtgaacagaatgggagaagaacaagacattattacagtaacggatcttcgtaaaaaatatggatcatttgaagcagtgaaaggggtatccttttctgtcaaacgcggcgagctgtttgcatttctgggaacgaacggtgcagggaaatcgaccactatcgatattctctgtacgctgattaaaaagacatccggaaaagtggtaatagacggttatacgcttggtgaggggaaagagaataatcatatccgcaaaaagatcggagtcgttttccaagagagcattttggatgaacgattgaccgtttatgaaaatatcatgaaccgcggacaatattatcatttaagcaaggcacaagtgcaagagaactatcagtttgtaacagactatttaaaattggatgatattaaggagaaaaaatacagcgatttgtcaggcggacaaaggagaagagcggatattgcccgtgccatcatccataaaccgactatattatttttagatgagcctactacaggtcttgatccgcaaacgagagtttttgtttggaatgcgattaaaaggctgcaggaagaaacaaacatgacgatctttttaacgacccattacatggaggaggccgctgtggctgataacgttgtggtcatcaaagaaggacgtctgatcgcagagggtacaccgagtcagctgaaagatcaatatgcgtttgacagtctgcatatgatgtttaagcaaggcgttgatccgactgcatggtttgaaaataaacaactggattttacggttaaaaactctatttattcccttcgtgtagagtccactctccaagcgtttgacattttgaaaggtcttgaaggaaaaatcgaatctttcgaggtgattaaagggaatatggatgatgtgtttatccatattatcgaagaacaaggaagcagtttgccagtaaaggggagcattgcataaatgaagtctttatccagtttaatcagcagaaatataaaaatatacttccgtgatcgaacgcttttgcttctttctttgctgtcagtatttatcgtcattctgttatatgccgtgttcttacagcagacacagctggacgccattaaggccttggtcggttcgacagatgattccaaagcaatggtgaacgaatggatggtggcgggattgctgtccattacagctgtgacaacgactttaggcgctttcggaattatggtgaaagataaagaaagcaagagaacgtatgactttttaacagctcctttatcaagggcgaccatccaattgagctatgtcattcattcatttgtcatcggcttgatcttttctttcatcgcctttttaggctgtgaaatttttctcgtttcaacaggcagcaaacttttaagcggaacagatatacttgaagtattggggatcattattctttcagttgcactgtcaagttccataaatttatttttaacgctgtttattcatacacaaaatgcattttcgacgttaagtacgattgtcggaacagccatcggttttttatgcggagtatatgtgccgatcggcggcgtaccggtgtttgtgcagaagattattatgtacttccctatcagccacaccgccgttctgttcagaaaagcgtttatgacagactcagttgataaggtatttaaacatgcttccgcaacccaaatacaggaatatgaaaagcattacgggatcgtctacaagttaaacggccattttatcagtacggctgcaagcttgtggatcattgtcattacagccatcatatttaccgtcatatctattttcatatttaaaaaacaaaataaatgacctcttcagacgatacataacgatgtaacaggcagcatccgtttactggatgctgtctgttttgtttatcattattctttttgtgggctcaattcttaattcctcaaagagttctcagatttctcttgtgttgaagatatctttatttacactgtatcgggcagatatatcttgtgaataaataagttgatgtttttctggtgtcgtgaagtgaaagaggaccatggtagagtcacttctgcataaagatatatttttgtccattcacaaggtatgatgtcatttaatttcttactaataagctggtacagatcttgcattttccaaccttttcaccttcaatcgtcgagaaatcctagttataaaaaatagcccagcagagaagcgctgggccattattgatttatagaccgaagtagcttattacaaattctttatcgtcctcatcttcaggcaaaatccccaagttttgatattcccataccacttgccgttgtgttccgtttaggtctgaggcgatgacatcggtgtaatcgtagtcaattgagaatttaccgcttcgttcgagatgtaaagtgaggtttgtccataagtcctcgttgtttgttttaaattcatcccgtaactcttcaaagtaatcatgcaattcatatagaagttcgtcatatatatcttcatcaacgttaaagtgttctggaatatcatgtgaatatatatattcctgattttgtggagtagtaaagaagaagtaaacttctgaagaatcatctaaaatttcggcataaagagcaaccttctcccactcagaggggataatttcatttatttgctcagcgattttttgatatagtattcccatcttttcagtttccacaatatcagaatcctttttaattttttagccgcttgaaagcttattatatgtttagatactcttctatgaattttctatcttcctcatcagctggcagtatgccgagattttgatatttccaaacatctcgtctttgaaggtcatcaagttcagaggataaaacatcatcataattataatcaattgaaaactttccggtgttttctaattttaaagtgagatttgtccaaatatcttgattgcctagtttaaattcttcttttagttcttcaaatagctcttgaagttcaatcagcagttgatcgtaaatctcttcgctcacatcaaaatgttcaggtatattatgagaaaataaataatcactgttatttggtgttgtaaaataaaagtatatatccgctgagtcatcaagtatttcagcatataaaacgatcttttcccaattgagatggaatcatttcatttagatgttcagcaatcttttgatatagttcatccattgatgatcctctacctttgaattgttgatggcattatttaatatttagataatccttaacaaattctttgtcctcttcgtcttcagggaaaatccccaagttattgaactcccaaatcatttgcctttcgtattcgtccaaatcagattcaataacatcttcataatcataatcaattgagaacgttccatcgttttcaagattcagtgtcaaatttgtccatgcttcaggattattttctttaaattcattgtgtaactgtttaaataactcttgaagatctaataatagttctgtataaatttttttactaacttgaaattgttctggaatgtcgtgagagtatatatattcatcgttttctggtgtttgaaagaaaaaatacacttctctagagccgtctaatatttctgcataaagaacaactttgttccattcggaagggatcatatcattaatttgttctgctatcttttgatatagaacttccatcttttttgtttccattagattaaccccctggtttattttctatagtaacttgtctcgctctacgattacctatcttatattcaacattaaataatacaggtcttagtgaatctccctgataaacgggttctatattaacttttacttgcttaggaggttttccgtttaatgcctttgaccacacttgctccattttgtaccatttcccgccgctcctattaatctgagaattcatcggcacgatgttgtcgaactggcctgagcccttgaattgagtagcgattaggtggcctccgtcgtcatctgtcagacggtctggtttacctgcttttgactgcgcatattggttgcgttttgcttctcccagctgcaagtctgctttgacacttgtaattctaccatagttgtcagtagtgtacgtgtagccttcttttgttttgtagatgacattcggcttcaatactttctttctggtccatttcgcaaaatgctcaacgtatttgactctactggcgaagcccggtcttcttcttcccttagaggaagttccgtacggtttcggtgtgtaaggtactcctttggcagtaccacgcatggagtgggcgatagtggagaataacctccagttatagttagtactttgtctgtgagagaacgcccctccttttgtttatctatggatatttatagttttttaggttttacatgcaaacaaaaaaggcctctgaaaaaaagagagccttcttctaggggactgaccccataagatgagacaaataaaaacaccttcaagtttgaatacggatgattgttatccgaaattagacttggaggtgttttttctatggggacaagagtaagttatccggttgaagcgaaacagaaggctgtagaaatgagattggcaggcgtacctatgaaagagatcatgcaggagttgaatattaagaataagacacaggttcagacatgggttagatggtataaggctggtgatacacatcgattcgaacagcctgttggaaagcaatacacttacggaaaaggtccggagtattcttccgatttagagaaactgcaggcagagattcgttacctgagacaacagaatgaagttttaaaaaagtacaacgaattggaaaggaagttgatagcgaaacgtcagtcgaacttgtagaaatattgcacagcacaatgaccgtacaggatatctgtattcatttaggtatctctcgagcgtcttattatcgttggaagaagaatctgatgaaggatcatcccaagcgccatttggaaaaacaaatcggcacgttgtgccgagagcacaagtatcgatatggatatcgaaaaatcacagccatactaaaaaagagaatgtgtattaaccataaaacggttcagaaatcattcgcagagtgtaaaggcacaagggagcttgactgcgagacctacaagtcgagcagggacgaaagtcgggcttagtgatccggtggttccgcatggaagggccatcgctcaacggataaaagctaccccggggataacaggcttatctcccccaagagtccacatcgacggggaggtttggcacctcgatgtcggctcatcgcatcctggggctgtagtcggtcccaagggttgggctgttcgcccattaaagcggtacgcgagctgggttcagaacgtcgtgagacagttcggtccctatccgtcgcgggcgcaggaaatttgagaggagctgtccttagtacgagaggaccgggatggacgcaccgctggtgtaccagttgttctgccaagggcatcgctgggtagctatgtgcggacgggataagtgctgaaagcatctaagcatgaagcccccctcaagatgagatttcccattccgcaaggaagtaagatccctgaaagatgatcaggttgataggtctgaggtggaagtgtggcgacacatggagctgacagatactaatcgatcgaggacttaaccaatttgaatgtatgcttactgttatctagttttgagagaacactctcaatggtttggtggcgatagcgaagaggtcacacccgttcccatgccgaacacggaagttaagctcttcagcgccgatggtagtcgggggtttccccctgtgagagtaggacgccgccaagctatcttaacccagttcatgatgaactgggttttttatatgaaagatcacatagatatataaagctaatgcctttcaaaggcattagcttttttgtttacattgattttgctttgctgttgtgatgttgaagattgtttgactttattgtctcgagcattcttaaactgaacacaatcagcagcataaggagcatcagtgcagtaaacagccagaacgcagtttgtacgggatattcatctaagctccagccgacggcgatcggaaggagtgaacctcctaatccgtttgaagcgagcagaatactggtagttgtttctgtctttccgggataaaaatgattcgtgatgattagggctattgcaaacatgcctgccatgaatagccctaaaaagaagcaaagggcaaaaccgaaccatacgtttttgcttaatgctaatacggtaagtgcagccagaccgccaatgcttatgagacggagataacggtgatatgtcagcttttctgataccgggcctgttaataacctaccgataatcatccccgtccaatacactgtaactgttatcgttgccaaagagttggggatatcccatttctcagcgaagatggaggggataaaatgtacaatggaaacttcactgccgccgtaaaagaagaaataagcacccgccaaggcaataaacagcaatccgtgtgaccgataaccggtgctttcttttttagtgtcatcggaagagacctctttgcggatgagaagctgatcaatactgccgaaactcatctgcttccatgcgattaagagtgcaaaactggataaccctaatactaaaaaagcaattgtccacatgtggttgttgataagaaagcctgagagcagaggcatgaacagcgcacctaatccgtaggcgacttccatcttgctcatggccacagcctgtctttctttaatagcggtgaggatgatcgtgcctacacaggattccaccaatccggcgccaagccccgcgatgctgacgagaagaaatagcagcggccagggcggcaggaaggtgatgaacatttcacagctgatgagtgccaggccaaagataacgacgtttttgcgcccaagctttttcaccatgtatggcatgccaataactccgatgagaaagcccatgaactgagagaatactaatacaccgccattactgtagctttgtgaataatgtgtgagtaactcaggcagtacggctcccagaataacaagtgtaaaagcaatcgatccataagaaaaacagcttatccacagcagacgagttttcatcattttatctccttattggtaaaatcatatttctctctactcgtatgacatgatgtttttacaaaaaatccaagtattgttactatatcacataactttttctcgtacatccattatggtaacgttaacaaattgttaacattttttacaagaaagatcgttgacattattttcaataatttatacgataaaaagcgaaattctaataatttcataggggtggtatttgtgggaacgaaggaaatcacgaatccagacagcttgtattacagtgttgacgatgtagtaatggagcgcggagaagggatttacctgtacgatcaagagggaaatgagtacattgattgcgcctctgccacgtttaacttgaatttaggatacggtaacaaagaggtcattgatacggttaaagaacaagccgataagctcatccatgtaacatcatcttttcaaacagacgccgtaaataaactggcagaaaaactagtagaaatcgcccccgataatctcacaaaagtacaccctaaagtcagcagcggttccggtgcaaatgaaggagctattaaaatggctcagtattactccggaaaaaccgatgtcatctccttatttcgaagccacctcggacaaacgtatatgacttccgctttgtccggcaactcattcagaaaagaacctttcccgccgcaaatttcttttggcctgcaagtccccgatccctattgcagccgctgtttttataatcagaaacctgattcatgcggtatgctgtgcgtagaaagaattaatgattttattgagtatgcgagcaatggaaaaattgccgccatgattattgaaccgatatccggaaacggtggaaacgtcgttccgcctaaagagtattttaaacagttgagaaagctttgtgatgaacatgatatcgctctgatttttgatgaaattcagaccgggttcggacggacgggtaaaatgtttgccgcggaccacttcgatgtgaaacctaatatgatgacggtagcaaaggggctcgggggcacaggctttcaagtcgccgccactctgacggaggacaagtataccgggcttccggggtatacgcactccttcacatacggctcaaatgtgatggccgccgctgccgcttgtaaaaccatagatatcatgcagcgaccgggatttttggaaaatgtaacgacggtcggtcattatattatggatcgcttagaaacgatgaaagaggatttcgcttttatttctgaggtaagaggcgtcggtcttatgatcggtgtggagattgttaaagagaacaatgaaccggatgtggagctgaccaattatattgctaaacgggcaatggattacgggctgattctccggacatcccgttacggattcggaaatgtatttaaaatccgtccgcctttaaccataacacttagtgaagccgaagtgctctgctacagacttcgcaagctattggaggaaatcaagtgagagactatatcattgagcttggacaatttgtttatcaaaaggtgaaaaatcaaaaaggcacgctgaaaaaccggctcgtaaacggctattctccgggaggcgacgcccaatttaacatagacgccgctgctgaggaggcggtgctggattatattcaagaaaagggccatccggttgctttttacacggaggatggcggcctgaagctgattggagaagatccgcaatatattttaattgtagatccgatagacggaacgcgcccggccgccgcgggacttgaaatgtcgtgtatttcgattgcgcttgcttcgtataagccaaacgcaaagattaaggatatcgagtttgcttttttacttgaattgaaatcaggcgcttatatgtacggtgatgtatacagcgatgccattcattttgaagggtatcatggagaattgccgaatttgagcgaagtgcgggatattaaaaatatgttttggagccttgaatttaacgggcatccggcgcagctgatgacggacgcatacggccatctgattgaccagtcggccaataatggcggggtttttgttttcaacagcgcttcttattcgatttcacgaattatcacggggcagatggatgcttatgtggatatcggcaatcgtctgctgaaagatgatccgaagctgctttcagattttcagcaggtcgggaacggacaggtgctgcatttgtttccttatgatattgccgcaagcgtctttttggcgaagaaggcgggagtggtcattacggatgcgtacggccggtctttggacgaaacgcttctgacagatttaagttatcagaatcagcaatcatgtattgcggcatcaacgaaggagcttcatcaaacattgttagaccaaatccgctggggcagaaaggaagagaaatatgaaggcgttggtctggactcctaatgataagcttgaataccaagaggtggacgagcctcaaattcggaaatccaatgatgtgaaagtgaaaattttcggcaccggtatctgcggaacggacttaaatgtgctgaaaggaaaaatgaatgcaacccatcatatgattatggggcatgaatcggtgggagcggtcgtggaaatcggaccggacgtgacaaatgtaaaagtcggagaccgcgtcgtgatagatcctacgcagttttgcgggaaatgtcattattgccggagagggctgacgtgttattgcgaaaccttcgaggattggcagctcggaatcggggcgcacggaacgtttgcggaatattacgtgggggaagacaggttcatgtacagaattccggattcaatggaatgggagcgggccacattggttgagcctctctcctgtgtgctgaatgttgtggacaaggcttcgattcagccggaggactcggtcttggttttgggatccggaccgatcggactgcttgtgcaaatgatggtgaaaaaaatggcgcgattgacggttgcgactgaaataggcagtttccgaagcgaggcggcaagccggatatctgattatgtctaccaccctgaagcattaactgtggatgaagtgaaacggattaatcaaggaagaaaatttgatgtgatttttgacgcgatcggcaaccagcttgattgggcttatccttttattgaaaagggaggcagaatcgtgccgatgggctttgatgatacgtatgagatgacggtcaggccgtaccagctgctgtcaaacggcgtaacgattgtgggcacaggtgaagcccgccagatcatggaagccgcgttagcatgcgcgtccgaccttccgcagctctatgattttattacggaaaagacggaactgaagaattatgaagaagccgttgatcatctcatgggcatcgacccggtgacaaaagaaagaaaggatatcagcgcaataaaaacgattcttgtgtctgatccggaacttttataaaagcggaaacggctccagtgagagccgttttcttttcttatttatacggcttgcacatttctttaaagtttaatatgatactctttgttaacaattcctttcctcaacggcattatactctgagcgtgtcctctttttccccgtaagcttgcctcatattccccagatgaaaatcaatgtttccaactgatagggtgcggatttttatagtgaaaaggagtcgttatcatttgaaagattatacgttacagcagcaatggttcgggaatgtccgtaaagacattctggccggtattctggttgccctcgctctgatccctgaggcgatcggattttcaattattgcaggtgtcgatccgatggtcggcctttatgcatcattttgtatcgcgattattatttctatcttcggcggcagaccgggaatgatttcagccgctacgggttcaatggcggttgtcatggtgacattggtggctgattacgggctgcagtatttgtttgcggcaaccattttgacaggtattattcaatttattcttggtgtcagtaagatagcgaaattgatgaaatttattccgcgttcggtcatgatcggatttgtgaatgctttggcgatcttgattttttctgcgcagctgccccagttcaaaggagcttcatgggtcatgtacgccatgcttgccggatcactggctatcatatatctattgccgaaggttacgacggctgtgccgtctccgctggtggcgatttttgtcatgacgatcattgcggtggtcttccatgcggatgtccgcacggtcggtgatatgggcgggatcacaagttcacttccgcatttcttgataccggatgttccgtggacgtttgagacattgcggattattttcccgtattctctggcgcttgcattcgtcggattgcttgagtcattgctgacagcccagatcattgatgaaatgacggatacggatagtgataagaacaaagaaagccgcggacaaggcatcgccaatattgtgaacggatttttcggaggcatggccggatgcgccatgatcggccagtctgtcattaatacgaaagccggcggacgcggccgattatcggcttttacggccggcgcgtttttaatgtttttaattgccgtattaagcggtatcgtcgtgaaaattccgatggctgcgctggtggccgtgatggttatggtgtccatcggcacgttcgactggtcatcgattaaaggtttgcggaaagcgccccttactgattcgatcgttatggttattaccgtcgtgacggtcgtcctgacaaatgatttatcaaagggtgtcttcgcgggtgtgctattaagcgcgatcttctttacggctaaaatttctaagctgaagattgtgtcacattccgaacagaaagatgtcagaacttataaggtaacgggacagatcttttttgcttccgtgtctgagctcatgaatgccatcgtttatgatgaagacgtgaaacggattgtcattgatttgaccgacgcccacgtgtgggatgattcaggagcggcggctcttgagaaaattgtcgccaaatgtaaagaatacggaattgaggctgaattaaagggattaaatcagaaaagccgagatttaatgaaacaaatggcatagaatttgtgaagtccggatgaatatatccgggctttttttcggttaaatttgccggggtgcattgttataatgaatgagacttgaaaaccgtatataggagacttgcatatgatgtggcttcagaagttgaaccaagtgttggggagaatcatgccgcttttgactccgtcaagtgtggcggcgggtgtgctgttatctcagcatatcagctggatggccggcgctgtgccgtggatatttgcatttattacatttacgggcagtctgagtgccaattttcaatcgctgaagcgcagtatcgagaagccgctcccgatgatcatggcattgtttgttctgcatattttcatgcctgtttttgcatggggaagcggccatctgattttcagcggtgaccctttaactgtgacggggctgattatgggtgtggtgattccgaccggaattacgagtttgatttgggctgcgatgtataaggggaatgtcggattgacgctgtctattatcctggttgataccgtgctttctccttttatcgtaccgttaagcctgtctgtcctggcgggggcgaatgttcagatggatgtgtggggaatgatgaaagggctggcggagatggtggtgattccatccatcgcagggatgatagtcaaccagttttccccgccggtaaggactcaggcaataagccggtcgctgtctcctttttcaaaaatctgtctgatgattgtcattgccattaacagttcggaaatcgcgccgtatgtcacgcacgtggatatcaaatttgcgggcatcgcaggcatggtattttttattgccatgacgggttatgccgtggcatggctgatcggaaggctgatgaagcggagccaggatgaaattgtgtctctgatttatacggggggcatgcgcaatatcagcgctggagccgttctcgccgtgtctttttttccgtctcaagtggcggttccggtcgtcatcgggatgctttttcagcaaatccttgcagctttgttcggctatttgctgagacgctttgaacttaagccggtcgtgatgaagtatgaaaaaaaccgctcagctacgtgagcggttttttccgtacagccagcttagtgctgcattgaattgtcgtttgaatgcttcttgatggtgcacggcgccttcttcaacagtgaaagagagctgagattgagaaaagcctttttgcttgaggctttcgtacacgtctttatttagtcggatcatggtgttttggatgttgtttttatgctcagcttcgcggctgccgacagacatatagatacgccgccgtgccggacgcaaagatgcggagcggacataatctgctgatttttcataccagaaggaaccggaaatacaaccgattctgccgaatatttcaggcttttggagcatcgcgtatatcgaaaacagtccgcctaatgacgcgccgatcagtcctctcgtttccggatgtgcagaaatgtgatgcatatcttctacagttggaatgatgacatttgtcagctcctcgagaaagagcctccctttgccgccgaaatcatgaaacgcagggctcagggaaggcgcgggccacggcgtgtactcatcgagcctgtcagccggtttgatgccgatgaaaatcaattcgggaagtgttccgttcgcaaattgggattcaagcttatccatctgttctaaaaacaaagaacccccgtccagtacgtacacacagggtaaagcccctgtttgaaccgaataggagggaggaagatacacagtgcattcctttccgtttatccggtgttctgtaagggtgcctctcatgcatccagccccttcttttgcttaaacagaagaaaaaagaaataaggaacgccgagaatcgcaagaataattcccgccggcacttctgaaggctgaaagaacaatttgcccgcaaagtcggcggatgtgacgaggagcataccgaccaatccgctgaccggtaatgagtatctgtgctcaatcccggcgagcctgcgggaaatatggggcgcgatcagtccgacaaatgccatgctgcccgctgcggttacacatgcgctgatcaaagcgatgcaggcaatgagtaaaatcgttttttctttattggttgaaacaccgaggcttttcaccgtgtcctcatcgaaacgaatggtatccagcaatgacgttttcgccataagcagaggaatgaacacgatcagccacggaaggatcgccgtaatggtcatccagtttgccgaccagatgctgccgtttttccaaaccatcgccatctcataatcctgcgggtccatttttaatgaaagaaataaagacagcgcgctgaatccggaattcatagcgatcccgacgagaataattctgcccgattccagatgcccccggtgccaggcgaaaatatagatcagcacggccgccatcaatcctccgatgaggccgaagacaggcatacccatcgcagaggcaagtgccgtcgcttcagattgtccctgaaacagaagcataaacgtgacgattccggctccggctcctgcattaatgcccaaaataccgggatcggcaagaccgtttttggtaatggcctgaataacggctccggctatccccaatccgagcccgatggcagcagccatgacaatgcgcggcagcctcagctgaaacagcaaaatgtcatattgcggattcggatggatgcggaaaagggtactgagcagttcacccggctttgcggaaaaagaaccgcttgtcatgctgaaatagcttacgagcaatatgagagcaatcagaatgatataaattccggccattttacgcaccacgctgatcccctccttttcttttaatcaaataaagaaagaaaggaacaccgatgatagaagtgacaacttcaataggcgtctcaaacggataattgatgaatcggctggcaagatcgcaaagggtcaggaagacgccgccgatgatgcacgcgcatgggatcagcctgctgtagtccgatccgacgagaaaacgtgtgatgtgcggaacgaccaaaccgacaaatgcaatttttccggcgagtgccaccgagcttccggtcaatatgacaacggccgccatcgccatgagtttgatggttcttttctgctgtcccagactttttgaaatgtcgtctcctaatgatacggcagtgacctttttgctgagaatcatggccgtgatgattccgatcgcaaaaaacgggacggccagtttcaaaaaatcagggttcatttgatgcagtctcgcactgtaccaaaaactgagatcctgcgaaatttgaaaataaatcgaaagcgcagccgacagactgctgagaagcatactggtcaccgttccgatgatggcaagctgcaccggggtaaaaccgccgggaagaatggaggccagcccgaaaacaagagcggcgccgaatgcggaaccgataaacgaatatatgatcatttcaatggatgtcgattgagggagcaataccatgcaaagggtgatgataaaagcggagccgtccgacacacccatgatcgaaggcgaggccagatagttccgtgtgattccctgcatgagcgctccggaaacagcaagggcggcgccgataaacatagcgccggcagccctcgggattcttgaatgccatatgatctgatggtcggtattctccggattaaagtgcagcaatgcggagaacacggtatggatgtcaagctgctttgcgccgtataaaacggaaagcagcagtgacagaacaatggcaatcggtgaagcaatgataatcatgtgtgtccgccgttttgcatacatgtgaaaaacctactctttattagtcttgagtcaacttgtcagccgcaacctgtaagaagctgattttactccacgcggttccgccttgggctaatggatcaatcgtattgacgtatacatggtcttttttgactgccttcaggctcttccagatcggatttttctctaagtctttcaaagcgcccggcttatctgcgttttcgtcatcagagaattgtacgaagatatggtcagggttcatttcgcttaatttttcaagagaaatcagttcctgcgctttcgccgctttgacttcgtccggcgccttcaggcctaaatcaccgtaaagcgtggagttgaaatatacttgttcaggataaatataaatattgccttgtctgattctgatgaccagcgcgtttgactgtttcgctttgctgttgatctttgtttttgtctttttcaggtcctgttcgtaatctgcgatgatttttttcgcttttttctctttatctgtaagctgggcgagcagcatcatgttttctttccagtttgatgagatatgagagacagggatcgtttcagcggtgccgctcaattttttcaacgttttttccgggaatttggttgatgccagaatgacgtccggctgcagctcaagaattttttccatattcggctgcattttttctcccgtagatacggatttatctgtaatatctttaaacagttccgggaatttgccggagaaagaaattgctcctgccggatgaacgtcaagcaatttggcgtcttccattgattctacgctgcctgtaatggcgattttgtcagtcggcgctttgacttcatatgtttttccgagatattcgattttctttttatctgaagaagcgtcctttcctttacttgctgtatcagatgtttctgagcttccgcaagccgcggccgtgaaagccaaaagcaaaatcatgaaagcgaatgccaatttcttcatctattgttcctcctgttcaattgataactattatcaattggaattatagagaatgaacagggataagaccatggataatttccggcattaccatggacgatcttcggataaaatggaaatgctttgctcgatcatccgctgatgtccgcttggagaatattcaatccacgggtcagatgatatgggaaacacgcgtttatcgctgacggctctaaggttctgccatatcccggtctgctgaatccgctgaaaataacgaagcgtttccggttctttacaagtgaaaagcatgatgcagtcagcctggcaatcagccagcatgtccaaggaaatcttttcgtcaggagcaaaagattccggttttgcggaggcaaagcctaaatcaccgaagaagacatcctcaatactgttgttatgggcgatgtacatattttctttatatacacggacaaataagaaccgctgatgccgcacgtgtttcagagcatctttcgctgaatgggcgagactttgataagctttaagccagtgccgcgcttcctgctcttcattcaaatatgcggcggtgcgaagaaactggtctctccaattctcttgagccggaaggtaaaaaacttcagtgatgtcattcaggcgctgtttttcttcttcactgacagaatcaagactgaaaatgatgtccggggcagcttgggaaagcgtgtgcaggttctcttcccaatttgcattatagcggtaagcactcaggtgaaccggaatatcggaagagaattgtttgtaataataggccgtccatttcgggtgcagcgccgcagcataaggcacgtgatgcagaggaatcagatgccccatcgtttcttttccgtacgcggccatttttgtgcgcctttttttcatatagcttgtaggtgagctgccggtatgttttttaaagatgcggctgaaataaaattcgtcttggtagccgatttgatgagcgatttcccgcagtttgcagtttgccttggccatcagttttttcgcattggttatgcggatgtctgtgatatattcagttacgctctgcccgtatagttttttaaaggtttcactgtaatgcttgggactgattcccgccatatgagcgagctgggtgagcgtgatttttgtgtcggactgagcatgtatgaattgttttgtctgttcgatcgccgctttcgtattattttgatggcatacttttgcagcataaaggtcatacatcagctgctgaaagtcggctgtatatttcattttctgcaatgcatccgccgatcgcacgttttcagaaagtgactgaagccggcttgtcaaatgatcaaccgtttgtaaattcatttgctgaagtccgtggaagatgtcttccccgttatccggaagcatcgcttcatcatctgatgaataggagaaaacacggagtctgacgatatataaatggatgccgcctgacggtataggggcaatattgaatgtctcatcacaaggacagatgtagagcgtttccttctgcagcggaaagctgtctgttccgatatcaatttgtccctcgcctttcacatgaaagatcaatacgggggaatcagtgagctgatgctctgacagaaggtcggctgttttttttacggagatgatatcaatgggctgaaagaataatatgtttttcatgagaaaccaccttttaggaaacattcatttaaatgataactgttatcatttaaattgtaccaaataaatgaatgttttcctataaaaagcggaaatgtgaaatgcgtcaaaatgttacacgtgtaacacgaatgttgtcagtatatgaggtattgttttcttatagttttgaattggtccagccggcgttgatatgtgccggtgatgtcttcaatggaagcgcctttttctatttttttgcgtacccagccgttaccgatcagcttgtcaaatgagcctgtcggcaagaataaaaagtcattcggatataagtcatgcatggttttcagaatggagagccctgtttttgccgcttcaaatgtgtttctgtttgttacgtagacttgtacgccgtggcacagcttgctctggtgcttggagaagctggggataaatgatgcggctctgaaggtgacgcccggaagcttgagactgttcaggcgttcttcgagctcggtgcttttcatataaggcgcgccgatcagttcaaacgactttgtcgtgccccttccttcggatacgtttgtgccttcgattagtcctgtcgccgaatatgcgaatatgctgtccggggtcgggatattaggcgaagggaggacgaacggcagaccggtatcttcaatcgtcatcgtccgcttccagcgcttcatttttacgacggtgaggtcggcgccaatatgaaactctttattgaataaaagagcaagctcaccgatcgtcatgccgtgcttcagcgggatcggatacagtccgacaaatgaagcgtaatccggttcaagaaccgggccgtccggatttcgtccgccttgcggattcggccggtccaatacataaaaaggtatgcctttttcttttgccgcttccatggcataggccattgtataaatgtaggtgtagtatcgcgttccgacatcctgaatatcgaaaatcagcacatctgtatctttcagcatgtcaggcgtcggtttcctcgtttccccgtacaggctgtagacgggaagccctgttttttcgtctatataggatgtgactttgtctccggcctgagcatcgccgcggacaccgtgctccggtccgaataatgccgtcaagtggatgtctggtgcctcatacagcacgtcaacgctgctttttaatgaattgttcacaccggtcgggttggtgatcagcccgaccctttttcccttcagttcctgtttataatctttcagcaggcggtcgatgcctgtttggatgcttggtttcttggcggtatgaaggtttctgtcagaagccgccgagactgccgtcatagcactgatgacgactaatccggcaataagcgcagccgtttgtgttttcatgatcagtcctcctgtttaaagcggttttccggtcttcagattgataccgaaaccataaggatacagtgtcgttcccggatgcgtgacggaaggaatgtcagcgggcagcctgccttgcggttttgtctgtccgaatatcgcttcaatacctgccggaatgtttggctggagaaattgtccgtctgtatatcctttaaagccgtagactgcgataagggcttcagcttcttcaaagttcgcagcgtcatatggattacgcaggctcatcagcacaaagggtttttggttcgattgtgcggctttcatgacggcccgcggaaatgcagtcgtccacttgccgggatctgtgacggtatcgtcgatcacgccgtcgtttacgacaggatcatttttcacaacatatgagcctgtaatcacgtaatcagcgtcagatatctgctttttgtgttcatcatgaaatgtgcgctcggcgaagttcattttactgatggttaccggccggatttttttcttcttgatgagctgccgaatggtttgttccattgacgctgtttgatcttcatatggagcggcaatgagaacgcggctgttctttttcggtttgaatgggagcgtgcggtttttgttttgtaagacggtgacggacctttccgcgatttgtttttccgctttcaggtgatttttgctgccgacggttttctttgcttttgcaatcttctttttcagatttttctctttcggggagggatatatccctcgttttattttcagggaaatgatgcgttccgctgatttgttaatttgctgcagcggaatttcccctttttgtaccgccttttttaaagcggaatgaacccgggcaaagcggttttccgtttgcagcgatgtcacttgggccggcatcagggcaatatcgactcctgcttttacggccatgacgaccgcctcttcctggccgaaatgatcggcaatggctttcatatttaatgcatccgtgacgatgacgccgttaaagcccatttcctcacggagaagatgagtcatcacttttttcgagagtgtggcgggtacgaggatgtctgaaccgtccagcttgcttttataggttgtatcgtcaaacgcgggaaattgcacatgggctgtcatgatcatatcagctccggcctgaatggccttccggaacggataaagttcaatctgacgcagcctttcttgattgtgggtgacaagcggaaggccgtagtggctgtcgacatccgtgtcgccgtgtcccgggaaatgtttgacggcggcagcgacatcctgcttttgctgagccttcattgaggcaaggccgagtgaagctgtcagatctcggtctgaactgaacgacctgacgccgatgacagggtttccgggattattattgatatcgagaacgggtgcgaaattcgtattaatgcccagtgctttcagttctttcccgataatggcgccggtctgggacgcgtaggctgtttttctagcggctccgagcgccatattgcctgggaaatgagtgccctcaccaagtctagttacgatgccgccctcctgatcaatgcttaataatagcggaatgtcagggctcgccttttgaaaggcatctgtcaggcgtaccgtttgttcagtgttttttacattttctgaaaataagataactccgccgaaccggtacttttgaataagccctgcgacttcgtcattcatttgggtaagagcctcaggtgatgactgcccctttttttgccaattgcgaaaatcaggcatgagcatctgccctaatttttcatctaatgtcatacgggataccgcttgttccgcctgtgacggaatgtccggttttgtcgatacatgatgcgtgccgaaaacaatgaacaacagtaatacagctgagatgacaagtttcatgatggtgccctcctgccttcatagtttggacaaaagacatgggttgtcattcaatggcttcataaatcgtttttatgacgctgccgtagcttccggtcggaaaaagatccccttcaaaaacattcgggttttcaccgggactgacgacgggggaatgctttttattggttaaaagcgcgatccccagcttataagcgggatcaataatcgtgacggtgccggtccatcccgtatggccatatgcctgcctgcttgcataagggccgaacatccactccatatccgggctgccgtttttccgccagccgagagcgaaagtcggatcagaggatgccgccgttgtgaacaaatcggccgttcttttattgaagagagaaacgtgtttataactgcctccgttcagcatgacttgaagaaggacggccatatcatcagctctggaaaacagcccggcgtgaccggacaccccacccattgagtaaaatgctttttcatcgtgaacttccccctgcagcgtatacgccctgatgtgagggaaatggatgactccgtcacgtgtgttgcctaaacgttcagtagctgcgaatgctttttctttaaagcttttttgcagcgggttgaacagtgtgtgcgtcagtttcagcggtttgtacagttcttgttccgcataggtatcaagggtttttccggttatgttttcaatgatgcagccgagaagcatgtaaccgatatcgctgtatacgtgttttgttcccggtttgtatgcaagcgggatttgagtgagaaaacggatcgttttatcccgttcttgtgaatacaaagggcctgcggtgtccggctgatagaaataaaagcttgccggcagaccggattgatgctggagcacatcgatgacgcgaatgcggtctttttcttgaatcggatcgctttttctgtctttgaaatcaggaaggtaagccgagactttttgatacacatcaagctttccctggctgacgagtcgctgtaatgcaaaattcgccgcgtacatttttgtattggaagctagatcaaacatggttgatgttttcatttttttcggacgggataaaagggtgttcccgtcatattttttgctgtagccgtatgctttctttttgatcacccgtccgtcctttacgacgacgaggacggctccggggaatcctgctgcgatgtctttttcaatcatttgatcaacctttctgagctttgctgcgtcgtataatttggcttgggcttcggctttgtgctgcggcagaaaagagaggctgatgaccattgtgagtatggcggctgtcagtgttttcatattctgatccctcccggtttattcaaattcagcagccatgtcatccttaaatccgaacgcataagtgaagacaaagcccgccgcgtaagagatgaagagaccgatgatatacaaaacgatttgagccggctgtacgagaaacgagagcggaaggccggagacaccgattgaaaaagtagccacctgaaaatgggcttgaaaggcgccgccgattcccgcccctaaacacgccgtcaaaaacggccggccgagcgggagcgtgacgccgaagatgagcggctctccgattccgagcagaccggatggaagtccgccgccgatagctcttttcaatgaggctttttttgttttcataaagatggcgaaggccgcccctacctgacccgcgcctcccatcgcgagaatcggaagaagcgggtcatctccgattgatcggattaattccaaatgtacgggagtcaagccctgatgcaggccggtgacgacaagcggcaggaaggcggctcccagtacaaaccctgagagcactcccccgacattcagcagcgacaataaacctgatgtaatgagatcagaaataaaaccgcctgcagggataaaaacgacatatgtcaccagcccggtgataagtaaagacaatgtaggcgtgacgataatgtcgatggattgatggacgtactttctgataaaccgttcggtataagcgataaaaaccgcagcgaaaagaacgccgattaatcctcccctgccagggagcagattctctccgaacaaactgatattggcgatctcagggttaaggatcaatatacccgcaaggccgcccatcgcgggagtcccgccgaattccttcgccgcattgatgccgacaaggacgccgaggtatgcgaataagcctgaaccgataaccgttaaaataagtgcgatttgggattctttcgggagccagccggcctgaatgacggctttcgtaataccggtgattaaacctgatgcaatgagtgcgggaataaggggaatgaagatgcttgatatttttcttagaaacagtgtgatgggtgtggtgttttttctgttgagatcggcttttttccgtgaggcggcttcttttaaatcaatgttttttccggatgacataagttttgcgaaagcgtcggcgacatgattgacgacacccgtgccgagaatgatctgcagtgtttcggcttcgacgacgcctattaccccgtccagccgtttcagcgcttcaatatccgttttgtcctgatctaaaggtgtaatcctcaggcgtgtcatacagtgggtaaagcctgaaatattcgatgaaccgccgcaattgtccaggatatctttggccagtgactgataaaatgcctctttgctcatggagatcctcctttgtccgtacgatttttcccagggagctgtgcctgaaacgagtctaaaagcgcctgcgccgatcatgaaaacggcgcgggctcgtaaaagcacattatttttcaccaaagaacgatcagcgttctttttcttttgaaacgtgctgttcaatggctttgtcaatgaagccttctgcttctttgagcagtgccttcgcgtgtgtttcatccgaattcgtcttcagcatgacgattgccgttttgacatggctgcctgcggcctcaagcgtttcttttgccttgtcgtacggaacgcccgtgatgctttggataatgccgattgcgcgttctttcaatttttcgttgctgacatgaacgtccaccattaaattttcgtacactttgccgcttttgatcatcacggccgtggaaatcatgttcagaatcattttatgtgccgtcgccgctttcattcgtgttgaccctgtaatcacttcggggccgacgacgacttcaatgctgtgatcggcataagtgctgatcaatgagtgtttattgcatgtgagcgcgacagttttggcgccgattgtttttgcgtatttcagcgcaccggccgcatacggcgtgcgcccgcttgccgcgatggcgatcacggtgtcttctgcggtaagcccgatcgttttgagatcgagagcgccggtttcctcgctgtcttctataccttcagccgcttgcaaaaaggcgtctgctcctccggccatcagaccgatgacagtgtcgggacttacgctgtatgtaggcgggcattcaaccgcatccagtacaccgagtctgccgcttgtgcccgctcccgcataaatcagcctgccgtttcgccgtaaggactgatgggcgaattgaacggcaatctgaatatcgggcagcacctgctgaacggcttcagccactttgaaatcctcttggttaatgatgcggagaatttccatcgtgtctgcttgatggattgaagcggtctgcggatttctggtttctgtggtcaatctgtgaatgttaagccggtctgtcatgattgtaccctcccaagtcgttaatacttgaagtatatgggcttctgaatagatgtttcaagaaaaatcggcagggatgagatggataatcaagcgctttcacaaaaaatgatgcagaatgtgctgttcgccgatggggccgatcctgcgacgacctttatcaataaaaccggaagaccggtacaggttctttgcacgatgattgcgatggtttacagcaagcacgatttcatcacaccaaggaaagtaatttgcgacaaaagcggggagctgcagcatcgcttgtttggcataaccttttccctgatgcggcgcatgtaaggacagcgcactcagcaaaatggcagacacattgttcgaatatggggcaatggtttcttttgaggtatgtaaaataaaaaaaccgacggggcggtcttcttttaaaatgactgtcgggtagcgatcccggatgacaagagcctgcggcagtacatccttcgggagagctgtgaactttttatcttcttcactcagcacaaacccgttcagcccgtctgcatgctccggtttataaaaggacagggctacatccatgatatctactctccttttttataattgatccaattcatcttctgatagaacacggcagcctgcccgttttaaaagagcggaagtgatgccgtctccgattattttttttcctgagaaagtgccgtcatagataaagctgctgccgcaggacggactgttttctttaaggatgaccgtggcggcgcctatttcttttgcgtatgctaatgttttttccgcgccgtccatatataaagccgtaacgtcttcgcctgatgccgttacgattcttgctgttccgttcagcacgtcttcgcccgtgccgccgatgatttccgccggttcgcggggagtggtgaagccgcccaaaagttcggggcagaccataacagctttcttttcttctacgagtctgcggattttttccgaagcggcgtgagagccgttatacctgcattcgataccgccgagacaagagctgactaagatcatctgtgtccattcccttcaatattttgatactttcatcataaatgaaataagagaggagggatgagtttttcagttaaaaaacgggtaaaaaagtttgaaaataaaaaaaataattttcctctttacaaatggggtacaacctgtatataataacttttgtcagctcgacgcggacacaacggcccgttggtcaagcggttaagacaccgccctttcacggcggtaacacgggttcgaatcccgtacgggtcatatggaggattagctcagctgggagagcatctgccttacaagcagagggtcggcggttcgagcccgtcatcctccaccatatttgccggcctagctcaattggtagagcaactgacttgtaatcagtaggttgggggttcaagtcctctggccggcactgtttttcaaaaaaatacggaggggtagcgaagtggctaaacgcggcggactgtaaatccgctccctcagggttcggcagttcgaatctgcccccctccaccatttttgggctatagccaagcggtaaggcaacggactttgactccgtcatgcgttggttcgaatccagctagcccagtctcagacaccttttgcataaaggtgtcttttttttatcagcattttgtttcgatttctgattgttcatcagatatactatttttaagctgctgttaaggcagtatattctgtattttccatctacaccctgcctgaaatttggtaaaataaatgtaataaaaaaaatgaaaccttttaaaacaatcaacgtatagatacagaccggtgaagggcagaggtaagataaaacatggaaaacctgattaaaaaaagaatcaagcaagtcaaaaaaggcgatcaaaatgcgtttgcagaaatcgttgacctttataaagataagatttaccagctttgctaccgcatgctcggcaatgttcacgaagcggaagatattgcgcaggaagcttttatcagagcgtatgtcaatatcgacagtttcgatatcaacagaaagttttcaacgtggctttacagaattgcgaccaacctgaccattgaccgcatccgcaagaaaaagcctgattactatctggacgcagaagtagcgggagcagaagggctgacgatgtattcgcagatcgccgcggacggggttctccctgaagacgccgtattgtcattggagctgtcggacacaattcagaaaaagattttaaagctgcctgacaagtacagaacggttattgtattaaagtatattgacgaactctctttaattgaaatcggggagattctgaatatccctgtcggcaccgtcaagacaaggatacacagaggcagagaggctcttagaaaacaattgagggatctttaagtggggtgatgaaatgagctgtcctgaacagatcgtgcagcttatgcataagcatcttgatggagatatccttcctgaagatgaaaacgtattaaaacaacatttgcagtcatgcgggaattgcaaacggcattttcatgaaatggagaaatccgtagcactcgtccgaagcacatcgcatgtcacggcccctgctgattttactgccaaagttatggcgaatcttccaaaagagaaaaaacgcgcttctgtaaaacgatggatcaaaacgcatccgatgattgcagccgcagcggtttttgtgattttaatgggcggcggttttttcaacagctggcataatgaccacaatttcagtgtgtccaaacagccgaaccttgtcgtgcagaatcacacggtcaccgtccctgaaggcgagaccgtaaagggcgatgtcacagtaaaaaacggcaagctgttcattgaaggaaaagtcgacggcaatgtgaccgtcgtcaacggagaaaaatacatggcctcagccggacaagtcaccgggcagattgaagagattaaccaattgtttgactgggtctggtacgaactgaaatcggcgggccagggcgtcgtgagcgctttggacccgagtgaagatgagtaaagcgtataatcgctttactctttttttgtgcatcgccgctctggctcatttcacttgagaaatcaaaatgtggtataatgagcacgctatatgatgtacatattgctcatgcagcacaattcataacagaaaaacgaaatgactgaattcttggaggacgaggaaatggcttttgaggacatcccatttttgcaatacctcggcaatgccgttgatattctccttgtttggtatgtgatatataaattaatcatggtcatacgcgggacgaaggcggttcagcttttaaaaggaatcgtcgtcatcgtattggtccggatggccagttcatatttgggactcagcacgcttcagtggctgatggaccaagcgataacatggggatttttagcgatcatcattatattccagcctgagctgagacgggcgcttgaacagctcggacggggccggttcttttccaggagcggaacccccgtggaggaagcgcagcataagacaattgaagcgattacaaaatcgatcagctacatggcgaaacgccgcatcggcgcactcatcgcgattgagcgcgatacgggaatgggcgattatattgagacgggcatcccgcttaatgcgcaggtcagctcggagcttttgattaatatcttcatcccgaatacaccgctgcatgatggagcggtcattatgaaaaataacgagattgcggcggctgcctgttatctgccgctttctgaaagcccgtttatttcaaaggagctggggacgcgtcacagagcggctgtcggcatcagtgaagtgacggacagcttaaccattattgtatctgaagagacgggcgccatcagtgtggccaaaaacggagaccttcacagagaattgacggaagaagcactgaaagaaatgcttgaagccgagtttaagaaaaacgccagagatacttcttctaaccgctggtactggaggggcaagaaaaatggataaattcttaaacaaccgctgggctgtaaagatcattgcattgctctttgcgctgctgctttacgttgcggttaacaacaaccaggcgccgactccgaaaaagccgggggaatccttttttccgacatcaacgactgacgaggctacgcttactgatattcctgtaaaagcatactatgatgaagcgaactatgtcgtcaccggcgtgccccagaccgtaaatgtcacgattaaaggctcgacaagcgcggtgaaaaaggcgagacagacaaagaattttgagatatacgccgatatgaataagctgaagaccgggactcataaggtcgaattgaaggcgaaaaacgtatcggacggactgacgatctccattaacccgtcagtcacgacggttacgattcaggaaaaaacggctgagagttttcccgtggaagttgaatactacaataaaagcaaaatgaaaaagggatacacccctcagcagccgattatcagcccgaaaaacgtgcagattacaggttcgaaaaatgtgattgataacatttcacttgtcaaagcatccgtgaacctagaaaatgcaaatgagaccattgaaaaggaagtgaaggtgaccgtctatgacaaagacggcaacgcacttcctgttgatgttgaaccgtcagtcattaaagtgacggttcccgtagccagtccgagcaaaaagcttcctttcaaaatcgaaaggaagggaagtcttccggacggggtgagcgttgcgagcattgactcgaatccgagtgaggtgacggtttacggtccgcaggatgtgctggattcacttgaatttattgacggcgtatctcttgatttaggcaaaattgataaagataccgatatcaatgccgatatcccgcttcctaagggtgtcaccaaggtatcaccggaaaaaatcacgcttcatattaaagtggacagtgaagacaaaaaggattttgacaatgtcggaatcaagacggtcggactgggaggctcacagcagattgagtttctcgatcctgaatcgcaggcgataaatattacggccaaaggctctcccgccaacattaaggcgctgaaaaagtcggacattgaactgtatgccaatgtctcggacttggatgacggagagcactctgtaaagctagaagtaaacggcccgcaaaacgtcacatggtccctgtctaaagacacggttaagatcaagctgacttctaagaaaaacacaagttcaaataaaaatgacggcggctccgctgattccggcaataagaacggcacaagcggagacgcagacaaagacaaaaacaagaaccgggaagacgatactgacagcgatcagaataaaagtcaaaaccaggatcaaaatcaagaccaggatgaagacggatcaagcgctgattcttcttcaacagaatgaaaaaggagcgatacaaaatgggcaagtattttggaacagatggtgtaagaggtgttgccaacagcgagcttacgccagagctggcctttaaagttgggcgttttggcggttatgtcctgaccaaagataagcagcgcccgaaagtgctgatcggccgtgatacacgtatctccggacatatgctggagggagcccttgtcgccggacttttatcgatcggagctgaagtgatgcgcctcggcgttatttctacgccgggggtatcctatttaacgaaagccatggatgctgaggcgggcgtcatgatctccgcttctcacaaccccgtacaggataacggaattaaatttttcggaggggacggctttaagctttctgatgagcaggaggccgagattgaacgtctcatggatgaaccggaagataagctgccgagaccgacaggcgcggacctcgggcttgtaaacgattattttgaaggcgttcaaaagtatctgcaatttttaaagcagacggcggacgaagatttcacaggcattcatgtagcgcttgactgcgcccatggtgcgacatcatccattgcgacgcacctttttgccgatcttgatgctgacgtgtctacaatggggacgtctccgaacggattaaacattaatgatggcgtcgggtctacacacccggaagcgctgagtgctttcgtcaaagaaaaaaacgccgatatcggccttgcgtttgacggagacggcgaccgcctcattgctgttgatgaaaaaggaaacatcgtcgacggtgatcagatcatgtacatatgcgcgaagtatttgaaatcagagggccgtctgaaggatgataccgtcgtatcgactgtgatgagcaacctcggtttttacaaagcgcttgaaaaagaagaaatcaaaagcgttcaaacggcagtcggcgaccgctatgtcgtagaagcgatgaaaaaagacggctataatgtcggcggcgagcagtcagggcaccttattttccttgattacaacactaccggcgacggtcttttgtccgcgatcatgcttgtgaatacgctgaaggcgtccggcaaaaccctttcagaacttgcggatgaaatgaaaaaattcccgcagctcttagtgaacgtgaaagtgacggataaatataaggtagaagaaaacgctaaggtgaaggccgttatttctgaagtggaaaaagaaatgaacggagacggccggattttagtgcgcccgtcaggcaccgaaccgctcgtccgagtgatggccgaagcgagaacaaaagagctttgtgacgaatatgtcacaaaaatcgtggatgtcgtgcggacagaaatgggagcggagtagcgaagtttataagcagagagcgaacaagacaagtgcgatcagcataatatgatagtaaacatgatgccggggcggcaaaaaataattgaccgtccttggcacatgctgtaaaatcaagcttgttcagcctttgtttttcacttgcaggaaaggcgggattgtttgcatcttttataattacagcgcccgaactaagcgcccgaaaaacggcttagttgacgaggatgggggttatcgaattttcggcggatgcctcccggctgattcatttagatcacagccgtaaggatttcttcaaaccggaggggcgactctccgaacaaagagaaatcacatgatcttccaaaaaaacatgtgggaggggacgattgaaagtccccttgtaatttgactttcttcgtctccttttgcacctttaggaggaagaaaaaatgtgtggaattgtaggttatatcggtcagcttgatgcgaaagagattttgttaaaaggattagagaagcttgagtaccgcggttatgactctgccggtatcgctgtggcgaatgagcagggcgtgcatgtgtacaaagaaaaaggccgcatcgccgaccttcgtgaagtggtggatcacacggttgaatctcaagcgggaatcggccatacacgctgggcgactcacggcgaaccaagcttcctgaacgctcacccgcatcaaagcgcactcggccgctttacacttgttcacaacggtgtgatcgagaactatgttcagctgaagcgcgaatatcttgaaaacgttgaactgaaaagcgacacggacactgaagtagtcgttcaaatgatcgagcaatttgtggcgggaggacttagcacagaagaagcgttccgcaaaacactgactctgttaaaaggctcttacgcaattgcattatttgacggtgaaaacacagacaccatttacgttgcaaaaaacaaaagccctctgttaatcggccttggagatacgtttaacgtcgtggcatctgacgcgatggctatgcttcaagtaacgaatgaatacgttgagcttttggacaaagaaatggtgatcgtgacaaaagacgaagccgtgattaaaaaccttgacggtgaagtcatgacacgtgcgtcttatatcgctgagcttgacgccagtgatatcgaaaaaggcacataccctcactacatgttaaaagaaacggatgagcagccgcttgttatgcgcaaaatcatccaaacgtatcaggacgaaaacggcagactggccgtggccggcgatgtcgctgacgccgtggcggaagcggaccgcatttatatcgtggcttgcggaacgagctaccatgccggtcttgtcgggaaacaatatattgaaatgtgggcaaacgtaccggttgaagtgcatgtagcgagtgaattctcttacaacatgccgcttctgtctaagaagccgctctttatcttcctttctcaaagcggagaaacagcggacagccgcgccgtgcttgttcaagtcaaagcgctgggtcacaaagcgctgacgatcacaaacgttccgggatcaacgctttcccgtgaagcggattacacattgcttctgcacgcaggccctgagatcgcggttgcatcaacaaaagcgtatacggctcagattgccgtcctcgcgatccttgcatccgttgcagcagaacgtaacggcgttgatatcggttttgatttagtcaaagaattaggtatcgcggcaaacgccatggaagccctctgcgaccagaaggacgaaatggaaatgatcgcgcgtgagtacctgactgtttcaagaaacgctttcttcatcggccgcggccttgactacttcgtgtgtgtcgaaggcgccctgaagctgaaagagatttcttacatccaggcggaaggcttcgccggcggcgagctgaagcacggaacaatcgctctgattgaagaaggaacaccggtctttgcactggcgacacaagaacacgtcaacctgagcatccgcggaaacgtgaaggaagtcgcagcccgcggcgccaacacttgcatcatctcgctgaaaggcttagaagacgcagacgacagattcatcctgccggaagtcaaccctgcgcttgctccgctggtatctgttgtgccattgcagctgatcgcttactacgctgcactgcaccgcggctgtgacgttgataaaccgcgcaaccttgcgaagagtgtgactgtggagtaatatatttaacccctttggttattagccagaggggttttttaatgcggaaatgagaaatacatactctttgcgattgtaaagaaatccccttttatatattgaaaaggattaacacctgctttataatacgagatgcattccggttaaaatccataaatgtaatcattagtaaatcatttttgtgcatgcctcatcagaaagtaatcaccttcagcagttttcatcatgaatatcccattatataaatgtaatcaatcgattacacatccacattatgcttaagactttaaaatccctgttgtatttgccgactcctgatccattatgaatactcgactagatataaaaataacaacatttttgcaataatccagttcaattctcaaaaaaagtcctgacaacaatgataggagtggaatgatgtcaaaccttttagaaatcagaaacatcagcaaatcttttggccataaagctgttttaaggaatgttacattcaatgtgcctgccggatcaattgtcggttttatcggtgataacggcgcaggcaagtcaacaacatttaaaacgatattaggattaatctctcaggatagaggtaaagtgaaaatctttggtaaagagaatttggataaacatataaaattcaaagaagatattggggtcgtatttgatgcgatgaatcttcctgcgcaccttacgataaagcagctgaatcatgtatttaagtaactattcgacgcttgggaccaagatcatttttaccggttggttcattctttctctttacctatggacaaaaaagtgaatacattctcgcgcggtatgtcaatgaagttatccgtagctgttgctttgtcgcataatgcaaaattattacttttggatgaagcaacgggagggcttgatccctcttcaagagatgacctgttaaatgaattaaaaagctttgtgagtaaaagcaacggcggtattttactttcatcgcacattatgactgatgtcgagaagatagccagccatatcattattatgaaagatggcgaaattttattaaatgaagagaaagataaggttcttgaaagctatactgttatagacgttgatgaaggccaattggctgagcttgacgaagatatcgttctagcaaaaaggaaacatggatcttattggagtgtgcttgtatcggatcaacagaaattgccgaatggcgtaacggccaacaccatttccatagaagaaatcagcgtctttttaacgaggagtgaaaacattgagaggtctgttactgactaactattacctggtttatcgaagtttctttgcatacacggggttggccatattggtatcagcagtcattttttattttggggatgcttcaatgcatcgttttgttgctatgctgattattttgtttgtcgtcatgcccgcacttgaggttataaagtatgagagcaagtctggctatgacaggtatgtcctgactttaccggtcagcagaacaaatattgttcaaagtcactatttcttttatcttttgattgttgtgatcggagccgtactatcttatggtgttttctttgtatacagcctgggatctgatgaaccgattgacagcatatttaatattgtctcttttggaacgttcatcgttctctttgccggtgcaatcgtttatcctcttctctacatgataggcccggaaaaatccgatgctatcgtgattggaggtgcaatggggggactttttgctacctttggattgcaaagtgtcgttgggtatgtagcagaacaattatcgccgtcatttttgcacataaatccttctttatatgttccggttatatatctcatgatcggcgttatcttatatatcatttcatttttcattgccgcagctatatatcataaaaaagaattttagcaactgatcaagttacaacaggataaggtgttgtctttgcatataaagaactttgtgaccttgagggttaatatttagcatataaaaaaaagggctttaatggaaggcaacatgctatatcatcaatatctgagagcaaattccgagtatttcggaaaacaagagatggcaatgaatatgaaggcgttattccaatcggtaagcctataagcaattcaagtgcttatatagtggatcgatatggaaacttactcccgataggcatctatggtgaactatatttaggcggagatggcgtggcaagaggctatttaaatcagcctgaattaaccaaggagaaatttatacaaagcccgttcttcgggggaaattatataaaagcggagacatcgccaggtggcgcagagacggtaacattgaatttgccggcagagcggatcatcaagtctagattcggggattcagaatagagacagaagaaattgatcgaaaattattgagccattcaagcattaaagaggctttggtgttagccaaagaaaataaacagagtcagtcaacttattcagacaatttgtataaaaatatagtcgaaggagcaaaaaaggaaccaatgttccaagagtatcttgaaactgagtactttagagaaaaagtaattgataaaataaaagcctatactcgatttttaaacagcattacacataaacacaaaattgctgcaaatcttcatcttattaaggcagcaggaaataaagagaaaaaagataatgatcaattccttttatataattggggagactttactgagagagcagtgcattattataatggattcggggaacatggtgaaatgctttcaaaggattatttatcaggaaatacggcattaattactgatatattaaaaaaaacagaagaacattcattaccttataaaggaatgtaacatttaacacaggagggaattgattttttcttccttcctgttttatttttaaataatccttgagagaatggtgaactatttttataagaaggtgagaaaatggataatatatataaattgctgattatagaagacgataaggatatggctaaggcgttacaaaatttacttgttaaatggaattttgagaccgttatatgcggagattttgataatattttgtcaatatatgaaaaagaagaacctcacatcatattattggacatcaatattccttcatttgatggtttttattggtgtaagaaaataagagaagtttcaagtgtcccaattattttttgctcttctagaaacagtaatatggatattgtcatggctattaacaatggcggggatgattatattcaaaaaccatttgacagccatgtattggtggcgaaattacaagcaattataagaagaacttatgagtacataacagcagaatctcatctaatcgaatctaataatgtgatattaaaccttaacgatgcaaaaatatatttccaagatcagagtttagagcttacaaagaatgaatttaaaattctaaaaacgttaatggaaaacaagggaaaagttgtttcacgggataatttaatgagacagctttggaatgatgatatttacgtaaatgaaaatacgttgacagtaaatataaatagattaaggaatagattagaggggattaatgttgatgacttcattttaacaaaaaaaggaatgggatatataattcaatgaaattaattgattatgtgaaaaaccatatattatggattttatgcagtgcacttattctggttgtaatcaatgggattttgtttgcgagtacctctattcatcaaagttatatagacattttttatatggatttgttgattgtctttattctactgatcaatattttctatggattcgtcaaggcaaaaaagaaatacgaagttgtgtttaatagttctatcgaaactttagaaaaaaacaaagttagaaatgattattttatagatatgcttataaaagtctccaaaaagcaacaaaataaatttttgaaagcagaagaagattataaaaacggtattaacgaaattcaagactatactactcaatgggttcatgacataaaagttaatatagctgtgtgtgaactgctactggatgagatcaactcagaaagcagcagagagctgcgtaatcaaattgaacaaattaaatttaggattaatcacattttacatgtgacaagagctaatcactacgatcaagacattttagcgggagtagtagatgtatgtcatattttaagaagtgcaataaaagaaaatgctcttttttttattaataaaaacattgagattgagactaatttaaaaccatttagtgttatcagtgatgaacgttggatctattatatttttggtcaaattcttaataatagcagtaaatatacacctgaggggggaacgctgactattacaactaaagaagagaaacaagcctattatataatgattaaagataatggaattggcatttcaaaagaggatttatctaggatattcaataaaggctttacaggtaaaaatggtaaggtaggaacgaaatctacagggatgggtttatattatgctaaaaaaatggctgataaactaagtataggaattgaggtagacagcgtagagggtgaatatactgaatttcacattatattttataaactatccgattactataaagtggaaaatgaggcaataaataattagttaaaaacagggggtaatctaatgagaagaaaagctaaaatattttgtattccatttgcagtgggtcatcgatagtttattctaagtggaaaaaattcatggatccacttggaggtaaatgaagtagagttggctggcaggggaagaagattgaatggccctcaatagacaatatggaagaaatggttgaggatatataattattaagaataatataactgaaccttttgctattttcgaacatagtatgggtggactgcttacatatgagctttgtcacaaatttcaaaatgaaggaaatcctgccctcgtgcatatttgtctccgtagaaaagctcctcaattgaagggaagaaaacgactaatacacatcttcccaaaacatgaatttatttctgatatcttaaaattagatggtacaggtaatttattttaagaacaaggagttagaagatattttcttgccgattttgagaactgagtttaagtcaatagaaacctatgaatttaatcctaaaaacaatttaccgaattcttttttatggagtggacgataagactgttgattttgaagaattatttttttgggagaaaagtaacccgaaagagatattaaattttcgtattaataagatgatatttcttataaatgaatataccgaacaagtagtaaaaaaatgaatgagacgttaaatacattaaaaaataatgaatcagaacgtaacagtgtttagttattatgagttgattaaggaaggtttatgacctgtgggttcctctaatttatttaaccttggaaacatagttcatgtttactttggaaatgattaaagtcgcaaattcgttgggtaaaattctgtctgcatttttattagtatattttgaaaaataggaacaaacagactaatcacttagtaagtaaatctaattggggatataaggtaaaaatcaaaccgccttttataaggagcggtgccgctccttatatctgcttaaaaacctcacatgctgaatatccatggttttgtacaaaagtcctctaacccatcaccccaccctaacatgaatgtcacattcacttttagaaatgtaacctaaatcgatagcagcgttttttgctctaaattataatacaactataagaatcaatgtcctacacatgatcagattttatgggggtttatagatgaataagatcgtagaggtatcaaatgtaataaaggagtatggtgaaattggcagtacctttcgagcgcttaaagaggtaagcttaaatatcaacaaaggtgaatttgttgggataatgggcccttcaggctcaggtaagacaacattgttaaatattatgtccactattgacaaagctactttaggagaagttttaatcgatggtaaaagaatagatgattacaaggatgaggaccttgcaaaattcaggagagacacaatcggatttgtcttccaagcttttaatttattagacaatatgacaattagagataacattgctctgcctcttgcactaaacaatgtaaaacacaaaatcatcctaaaaaaaattgatgaactaactgagctcttaggaatttcaaatcagttagataagtatccatatgaattgtcaggcggtcaaaagcaaagagtagctatttgtcgtgcgttaattacctctccaaaggttatttttgcagacgaaccaacaggggcccttgactctaagtcatcctcagaggttctagaatgttttaaaaatattaacaaaaccataggaacaaccatcattatggtaacccatgatgcaaacgcagcaagttattgtaatagggttatgttcttaaaggacggtaaattacacggaagactagacagcagcggagataaaaaggaattatttaagaaagtgttaaacatgcttgccgtaatgggaggatcggaaaatgaactcctttaaaattgcgtttaagcttttgaagaacaatttaaaaatatatggattatattttgtggttttagttgtaactgtggcaacttactacaattttactgctatacagtacaatgaagtgtttgtccaattaactgaaagatttcaatcagctgtagtggcaagtgcaacatctggctttgttctaatttgcacagtggtcttttttatgtggcatgccaatggattctttttaaagcaacgtcaaaaagaaaccgggttatacatgctaatgggaataagtacgtctaaaattggaagagtattcgcaattgaaagtattctaataggcagtttgtctctattaatgggtttattgatcgggatattattctcgaaattgttcttaatgttattaagtaagtccatgacactgggtggtgaaattccttttagtatatctgcacaagccatcattcagcttattattgtgttcgggatcatctttgtaatgctgggaatgaaaaactatagagttgtgaaaaaaacacaactaattaatatgttgaatgcttcgaaagcaaagccctcacctccaaaatataattatataaagggttttacaggtttagtattaattgctgcaggctatatagttgcactaaactttaagcaatgggatttggatttattgctttctgcgatgggaatcttgatcttggtcagcacggggacttatctgttttttggaagttctctgactataattttagggaagttaacaaattcaaaaaaaattatttataaagatgtaaggttagtcagtataagcaatacattctttagacaaaaagttaattatagaagtttagcgatgacggctattttaacagcagctaccgtaactgcattcaatgtaagcatttcgttcaaacagtttgaagcaaattatgacatcacagcctccccatacagtttaagttttgaaagcaattctgaagatgtcaaagataaagtcaaagaagtgatccgagagtcaaagcatgacttaatcggaatcaataagattcacttttttattggtaatgtccaatacgacgataataagcaaaatattgatccgaataacaaaggtattatcactagttactcacaaataaagaaaacattaatatttttggattatagtaataaagcaagtattttgaatcaaattaaaccagaaattcatgaaatttcttttattctaaatgctgattcgatagcttcacctatttatgttgatggtaataaagtgagcattaataataataatttcctagtttctaaacatacacagctcccttttacagggaaaattaaaaaatatggtgacaaaaacatttatgttttaaatgacaatgattataaagaattaagaaagaaaaaccaagagattgtattaaatggtgtgcgaattacagatgaaaaagaaagtagggaagtggttaatagaatcaaggaagttgtaccaggtggagattggaatgtaaatggaaagaatcaaagctttacatgggagtattatgctttaggtcaatttttctttttaggcctgattatgtccctagtattcatactagcgacctttagtacaatttactttaaaattttaagtgatgcattcactgatagggaacaatattcaatgttgaaaaaaattggtatgagtaaaaaggaagtgcagaggtctgtctatctgcaagttggaattgcatttttactgcctgtgattgtgggagcccttcatagcattgtagcaatgaatatgctggaacagattatgaatgtaaaattcaccattctaattctatgcggcatcggattatttgttcttataatggttgctttttatataggactctgtaaaaactataccaaattggtatacgaagagcagtaaaaaaatgagaagaattgtccagtaaatttataaagagagagaagatctcatatgtcatggttaactaaatggtcctttgctaataaagctgctattacgttaacatccattattataatagcctggggagtagtcagttatcttcgtatattagtgaagaaatcagagtcggtcaatcttgtctcacaaagcttagcagttgttgttattggaggtttggcagtagcaaccatgcttaccttaatagtgataccatgcgtatatgaaatatttaattttaaaaaatcaaaaatgcaaaggcgtgaaaaaacattgaaagatgatataacaatttaaataaatttattgatgtttttgggacagggaacagaacacttttcgaagtcagctgtcggtatatgaccggcggctggttatttagttagacgtctataaagaagcgctgcagcaagatcctttgttgagacatacggcggcagaagcggccgcccattacggacaggggctcacgaagcttgcgagaacgggttatgatgcaattcctgatttggttctgtccattgagtataaaaacggatctctgcgtgatgtcggccaaagcaggcaatacggatttggggatacagattggctttctgaatggaaacgggagctgggtgtgcgtatataaaatgagaaaaaagctgacaaatgatgccgtcagcttttctttatgcgtttacttaaaactcctcatactccgccgggtcttggccgtttatgcgtccgtcggggcgggtaagcgagtcgataatgctcatgtcgttttcatcaagagagaaatcaaaaatggagatgttttcaagctggcgctcgggcgatgttgattttggaatcgggatggcgcccagctggatatgccagcgtaaaatgacttgagaaatggttttgccgtatttgtccgcaatccgtccgagtttttgatcgttcaatacttcgccggcgcgggataacggactccatgattctgtcacgatgctctgttcttcgtgccattggcgctgctgctgctgattaaaagcgggatgcagttcaatttggttgatgcctggctttacgccggtttcacgttcgagccgttcgatatgctcaggcaggaaattgcagacgccgatggatcggatcaggccccattcttttgcatcaatcagtgcctgccatgcttccgtgtagcggtcttgtttcggattcggccaatggacgagatacaggtcatagtagtccagaccggcgcggtataaagattcttggatggtttgtacagctttgtcatagtcatggtagcgcccgggcagcttggacgtcacgtatagctgttctctcggaacagagcttctcttgatggcttctccgaccgatccttcattttcatagttataagcggtgtcaatcagacggtagccgatatcaatggcgctggtaatggcatgaacgccgttgtttccattaagagcgtatgtaccgaagccgatcgcgggaatgcttgtcccatccagcagtttcttttgcggaattgctccagtcatcattaaatccctccttgttttctactttaccattatttttacaaatgaaacataataatggaaggaaatgagatgagccgcacatgaaaaaagctgacggagaaccgtcagctttaaatttgaaacatccatgctacgacggggccgaagaccgaccctaacacggcgcagagcgtcatggaaacagagctcatggagaccgttaattctccgtactccattgcttttgaggtgccgagcgcatgggaagcgctcccgaatgcaattcctttcccgagtgagctgcgaatgcggatccacttgagaagcagcggtcctaagataacgccggaaaaccctgcgatcatgacgaacacgactgtcatggaagggacaccgccgataccggacgcaatctgtatggcgacaggcgtcgtaattgattttgggataattgacaaaatcaaactccggctgatgccgaacagctctgcaaatagcaggccgctgaccattccggagaataaaccggccaacacgccgccgatgatcggaaacatatacttgattaacacccggcgctgcttataaagcgggtatgccaaagccaccacggcggggccgagcagtgaattgatccattgtccgccgatcatatagtctttatacgaaatatgaaaaacaagcagcacggcgataatgaaaatcgtagtcgtcaaaaccggtatgagaaagggatatggaaagcgtacatataatttcaccatagccagataggcggcggccgtgaacaaaattataaggattgcgatacatgcttgctgcacttctttttctcctttctctgattggctttgtgctctaacagctggctggcgtaccctgcggcgatcattgtgacgatggtgctcagcacgatgatcagaaacagagcagccccgctggcggaaaacagtgacgggtaattgatgacgcccgtcatggccggaatgaataacagcggaagaaaagacagcaaaaatccggctccgtcttcaatcattttgacgggaatgatcttaaccgataaacatatgatcagcaggatcaaaccgatgatacttccgggaatgggcaggtgaaagaactgctgaacggctcccccgataaaggaaaatgcgaataaaataatgatttgcaagatgatgcgtatgactttcacgacaatgctgttctttggagaagagcagcttccccctttcttgatgcttcgatatgtttctttactttttgcgcatatatttgtactatacaaatatatgtatgcaaaatctttctatatgttttcttagtaaatgtgcatatgtttgtattatacaactaatattgctgttgtcaattgtaaggagtgaggctgtttgtcaaaacaagatccgattgaattaattgaatatgagctcaccacttttatcaggagagctgtttatcttgataactccgaccgtaaaatcggacatctggaaagggctgcgtatttgttattacggcagctggatgaattcggaccggcgcgtgtaaaggaattagccgaatcttttaagctggatatttccacattgtcacgccaggccgcggccttggagtcgaaagagctgatccagcgtttttccgatccttctgacgggcgggtcagtctgtttgcgattacgaagcttggcaaacagaggttaaaaactgataaaaagatgcgtcttgatcgataccgacatatgcttgacgattggtcaggcgatgaaaaagaaaagttcggccggcttttgctgcggctgaatgaggcatttatcgattaatgcatgattttgccggttaagcaggattatggcgtatacaagggagaatggaagagagtaagactttacgccattctgcttagcaaaaataatattgaataggggggcggaacatgtttctccagggacatcctgtttctcggaggctgcggcatttattatctcaatattcataattcaataataatgaaagcgctttatttttagtttgtcggtttagggtgcagggtgtttacctgaaaaaaacaattgtattttccacggaaatttattatgatgaaataaggaaattggagattatacaacaatagaaaaatagaatatttctaatattgcgggaaatgaagagtgagttaggttcaacaggtgcaccttctgcttcattatttcacatatatcagagctgttaagaggaggaagcgaagtggcaaacaaagaattaaagagaggcttaggcgcgcgtcatatacagatgattgcgctgggcggcacgatcggtgtcggtttattcatgggatcatccagcacgatcggatggactgggccgtctgtcctgctggcttatgcgatctcgggtatctttatcttttttatcatgcgtgcgatgggcgaaatgctctatgtagagccgagtacagggtcgtttgcgacattcggccataagtatatacatccgttagccggctatatgacggcgtggagcaactggtttcaatgggtgatcgtcgggatgtctgaaattatcgccgtcggttcgtatatgaaatattggtttcctgatctgccggcatggattcccggcattatcgccatggccattctcggtgcggcgaatttaatttcggtaaaatctttcggtgagtttgaattttggtttgccatgatcaaaatcgtcaccattattctgatgattgtggccggaatcggaattattttcttcggtttcggtaacggagggcatgcgatcggattatctaatttatggtcgcacggcggtttctttacgaatggtttttcaggatttttctttgccttgtctttggtcgttgcggcctatcaaggggtcgaactgatcgggattacggcaggggaagcgaaggacccgcaaaaaacgctgcgaagcgcgattcagagtattatttggcggattttaattttctacatcggtgcgattttcgtaatcgttaccgtatatccgtggaatgagcttcactcactcggcagtccgtttgtttcgacatttgcgaaagtcgggattacggcggcggccggtttgattaactttgttgtgattaccgctgcgatgtccggatgcaacagcgggatattcagtgcgggacgcatgctttacacattgggcgtgaacggacaggccccgaaattctttaagaaagtttcttcgagcggtgtgccgatattcggtacgtttgccgtattaatcggacttgtgatcggtgtcgtgctgaactacatcgcgcctccgaaaatctttgtctatgtgtacagcgcgagtgtgctgccgggaatgattccgtggttcgtcattttaatcagccatctcggtttcagaagagcgaagggcgctgagcttgataagcatccgtttaaaatgccttttgcgccgtttacaaactatttgacgatcgctttcttactcatggtattgatcggcatgtggtttaacaaagatacgcggatttctctggttgtcggggtgattttcctggcgattgtgacggtcagctattatgcgttcggtatcggcaagcgcatgcctggtgaaaaatcgaaaatagaagacgctgtataattcaaaaagacacctctcttacaggggtgtctttttcggcttgtccgcgagtggtatactggttaaaaaaagcagaaccgggggaaacatcgatgagtcattaccgtacgttattatttgatatagacaatacgctgctggattttaccgcttcagaaaccgatgctcttcaaaaattgtttcaaggttcaaagctggagctgacggcagaggtggaagcccgttataaagcgttaaatcaagggctgtggaaggcgtttgaagagggggaaatgacccgcgatgaagtggtgaatacacggtttgcccttttgtttaaagaatacggcttcgaagccgacggcgtgctgatgaatcaggcgtaccgccaatacttagaagaagggcaccaggtgatagacggagcttatgagctgattgaacggctgagtcctttatttgatttatacatcgtgacgaacggcgtctcaagatcacaatataagcggctgggcgactccggtctgtatccgttctttaaagatgtgtttgtatctgaggacacgggttttcaaaagccgatgaaggaatactttgattacgtgtttgcgagaattcccggtttttctgccgagggcggacttattatcggcgattcactgagcgcggacataaaaggcggccagatggcgggaatggatacgtgctggtttaatcccggaaagaaagcaaatgagtccggaatcatcccgacgtatgaaattcattcgcttgatgagctgtatgatgtgctgaacgtggagcggaaagccgctgctcatttgtaaggagaattcgatgaagattgcacatacgaagttactgatcaggggttttgcattactatcaatctttcatgcgattcttcagcttcctcccggccggggggagctgaaggtttttttgtctgtgctcgtgattatgctgacggctaatgactgcctgcggccgctatatatgaagagaaggccggctgtatatcaagtctcttttttcctgagcagcgttatcgcgggagttcttttgtacaatgtctatagtgtggggacacaggccgtaatggtgcttttattggcggaggtgcttattactgataagcagatttcggctgttttgttaacgatgaatgccgccgcatttgccgcagctttatacgccggcggagcgggtgtcagtgatatcgtgccgccatacttcatcatgtttgcggtgatttatttatatcggagaaacctgcaggagaagtcgaaggttgaattgctgaaccgagagctgaagatcgctaatgacacactgaaggaatattcagaccggattgaggaactggccgttacgaaagaaagaacaagaattgcgcaggagctgcatgattctctcggtcattatctggctgctctgaaaatgaatttagaatttgccgggaagacagccgggcatcagccggacaaagtgaagcagatcattcataaggcgcatgatcttacgaaagaatccattttaaagcttcgccaggccgttatgctgctgcagggctctttgccggggcggggatttgagcaagagctccgtgacattttcagccattttcaagaggcgggaggcatacgcttcgagctggagacggacgcggccatagaagcggaacagccggatgtgaagcattgtctttatcaatccgttcaggaaacgattacgaatgcgataaagcatggacatgcttcatatgtttctgtccggattcaaaaaaaccgaaacatgatattggcgcatattcataataacggctcagcctgcggaacgatcataaaatcaaatggtctgaaaggaattgagaaaagagcagccgcacttggcggagaggctgttttctcgtctgggaaggaaacgggttttgacgtgaaaataaggattccatgcaaggaggaataatcaagtgaatgtcatgattgcagacgaccagtccattgtgagagaggggctgaaaatgattctgagtcttcatgaaggaattcaaatatcgggagaggcttctagcggcgaagaggttctccggctgctttctcaaaccgaaaccgatgtgattttgatggatatcagaatgcccggtatggacggaatcgaaacgacaaaagcggtaaaagcgcgatatccgtccgtaaaagtcatcattctgacaacgtttgaagatgatcactatatttttgccgggctgaaaagcggagccgacggctatctcttgaaggatgctgattcggatgaaatgatcgactcccttcaagccgtttatgaagggaagatgatgctgaatcccaaaatcacggtttccgtcgtaaaagcgctgaacaatatggagatccctgcggtgcagaaagagccgcggacaaagctgaaggagattctgacgccgagagagcttgatgtggcaaaacacattatggaaggcaaaagcaataaacgcattgccgcagacttatttctgactgaaggcactgtgaaaaactatgtatccagaatcctcgataaacttgaagtgtcaaacagaaccgagcttaccttatatttgcaaaaattgctataaccccgcttcaccctcctctctccctttttatcactaaacatatgacgaaagtaatacccatatcgagtacgaaagtgaatagaaaacaaggattgccaagagtagaataagtgcagacatgacacaaggagtgctgcacgaatgctcgaattaacggatttgacaaagaagtacggcgattttaccgctgtcaatcatatatcactgcgcgtcgaaaaaggagagatattcggtctcctgggaccaaacggcgccggtaaatcaactacggtgtcgatgatcagcaccgtgctcccgccgacgggcggaacaatctgcattgacggaacctcattacaggagcagcctgcggccataaaaaaagtgatgggagtcgtcccgcaggaaatcgctttatatcaagcattaagcgcaaaggataatttggcttttttcgggagtctgtacggactttccggtaaggaactttgtaaacgggttgatgaagtgctggacatcatcgaattacaggaacagcgacatcaaaggatatctgagttttcaggcggcatgaaaagacgggtgaatatcggggccgcgctaatgaatgaaccgaaactattcattttagatgaaccgaccgtcggaattgatccgcaatccagacaccatattcttgaaaccgtgaagacgttaaatcaagaaaaagggatgaccgtcatctacacgagtcattacatggaagaggtcgaatacctctgtgaaaaagcggcgatcatggatcacggctcaatcattgcctgcgggacgaaagatgaattgaagcagtcagccaaagcctctgataccctgatcgtgaatgcagaggggctgaatgatgacgccgttaaaaaaatccgccgcattcccggtgttgccgaggctgctgtcagccaacagaccattacgatgctcgtctctgcggcagatcgcaatatccttgatattgcggatgatatcaggaaaaccggtatcaccattaaaggcattcatttcgaggaagccaatctggaaaccattttcctccggctcaccggcaaaacgctgcgggattcatagggggcgtcatgaaaatattattcaggctgatcttattagattttcggttattggccggagcaaagtctttctatataaaactgattctgtttccggcactgatgatttttattttaggaacggtttttcacggcgattcgaaagtgaagccatttcagaccgccttttataatgcggatcacgcggagagttctttgggcgacgtattaaagaatgacgtgctgaaacaaactgatctcatccgtgtaaaagacataggcagttaccatgaagggaaacagcttgtcaaaagcggcaaagtctccgtttttgtatacgtgccgaaaggctttgcaaaagcggcagaacacaatgaaaaaacaagtatcaaagtcatctcggaccaacaaggctctgtaaacggagacattgtggaaatgatggccgattcgtttgtcaccagagtaaaagcggagatcagtgaagaaaaagcggtgctgaagcagtcgggacatctgtcaaagggagatgcccgcaaaatcatcagcggcctttcgggtgaacgtgaactggctgtcaccattccgaaacagtcggccggcaatcacgcggctccgattgatgcgatgcagtattattcaatcgcaatggtcgtcatgttctccattatgaccgcgtttgcgctcattcacgggatagtggaagagagacagcagcacacgttattcagaatcaaatcaatgcctgttttacgtatccagtacgtggcgggtaagcttttgggaatcatgcttgccatccttatgcaaatggctgccgtcatcatcgcaagcagcatcttgtatcaggtaaaatggggcaatttgtttgaaatattgctggttacgatcgtttattcatttgcgatcggcagtatcgtgcttctttgggggtttactgcaaaaaaccacgagaccgtctcaagcatggcggctcccattttatacggattcagttttttaggcggaagctttatcgcaaaagacggcttgcctgacagtttgaaaattgtccaggaactgataccgaacggcaaagcgatcaacagctatgtcagtgtcacgcagcatgccggtctgagcggtattgcggcggatttggcagagcttgccgccatcggcgccgtgtttttatgtttgaccatctgggtgtttaaacggaaggaggctgtttcatgacgcagctgttattcatgatcagacatcagctgaaactgatgctgcaaaatcgggctgccatctttgcgacgatttccgccccgctccttctcacatatttcttttccttttctgcggatggcagtcagcagaagaaagtatatgtagctgatgaggatcagagcgcctattcagcgcaatttatgaaaatgattcagaaagccggccatataaaattcacgaaggtcacggaggacgtattaaaaacaaaggttcatcatcaggatatatcctttggattgctgatcggctctcattttgaagagacgttattttccggagatgaattgaacgtttcatttattcagaatgaagaaaagggtgatgctgttttgacagagcagctgattgcgcagcaggcgggcgcgctgaaaaaaatagtccgcgatgcaaaagtgatatcccgcacgctgcacaccgacgggaagcaggcggcagctgatctcttgaaggatattcagggtcattccgccgtcaatgttgaccgccatcacgtttatgaaggcggacaagcagccgacagacttatcgggtttttagtgatgtttatctggttcgttgcagtccaaagcctgcgatcatttatagatgaacaagaaaatcatacatatgacagattgctgagcacgcccgtttcctatacagcatatgcaatctctaagtttgcggcggcgtatcttttcggacttctccatattatcgtaatcctcgctgccggaacattcatgctgcatatccgttttgctgatcatgtttttgctgcgggagcggtgcttgcggcctgctcgtttgcgctgactgctgtaacgatggccgtgataccgttcatgaagagccaaaagcaattcacgtcgcttgcttcggtttttatagctgtcacgggtttattgggaggggctttcttcacattagacgcggctccggagtacatgcgcatgctgtcgttgtttactcctgaaaaatgggcgatcggcgcgtttcaaaacaatggcggaggcagcatgcagatagtgccgctgagcctgtttcttgccgccggtgcagcgtcattggtcttatcactttatatgataagccgtcatatgaaaaaaaacggttagaagggtggctgctttgtatatggcagaaatgatcggaatcatagaattgctcgcgggagttgcaatgaacgtatggatcgggcggctcggaaaaacctttttcggtaaagatgacagaagttcgagagtcgtgttaagaatctgcggcatctttctcatgatcaacggcgtttcaagagcgtttcatatctagttcacaaagtgttccggactcttttataaaatgtaatctttttccttgtaaatcgtgtaaaatagtataggattctacgaaaagaataagagggggaagaaacatgaaaaagagactcgttatgctattcgcggcggccgccgctgttttgttgcttgtgagcgggttgtgggctccatcagcgtctgcggcgccggctcctgctttaacacaaatccgtattatcggtgtgacgtctgacggtcagagttaccaatgggaaaatatcgggccgaaccaaatcagcgcatcaaaaccgatgaagggtacaacgggttatttagccgtatatttccaagggtatccgaacaataacacgatccaggcatttaacaacggaacgaatattacaaatcttacgtcaaaagcgctggaagatgaatatacgaaaaacggcaatatcgttacaggctacattaaatattacagtgttcctctttcttatgtcagttcaggaacgttctctttctccgcaacggggctgaacgggccgtacacgccgttaagcagcggatttttctccattcaggtacagagttaaaacagccgcccggtgctttcatgtatagtttttctctctttccgggaagctattcctatagaaaagggagggcttacatgatggacaggacactcggatatttgcgcgagtcgctttcgaaccacttggagcatgatgtgtgccgagggatttataaaaagcttcaggtgaagcattatgcaaatgagggcgagtttgtgaaagatctaaatgatttggaaatggatgcgctgaatcagctgcttgaaaaggaaatcaaatatgctgagaacgagcaggatgagaagcgcacgatggaattgaatgaagtatatgagctcctgttttaaaaagcctcccggcggtcgggaggctttttattgtttcggaaacagtttacagaatcatccaaccctttgtataatggatagttgtgaaaaacacagacggaggagaaacatgaacgaaataaaaaaacagacggttcttgagttgtcatcggttgaaaaaactttggtttttctggtgccgccattattggggctggtcatcggatggtttctgccggtcattgcgaagtgggccgtaacattggattggctgccttttcacgggccgctggacattatcgcttcttttcacggatggaaggctgcggctgcaaccgccgttatcggcttaatcgggggagtgtggctgacgcgggcagcttttaaagaaactcttgtggcagtcgtgacggacagcgaggtgtccttaaccatatataatgaagaaagcgtgttttcgaaagacagcatttccggtgtgtttacggatgaaaagcatcttgtcttattggggactaaagggcaggagctttttcgggagaagcttgagcccgcggttgaaaaagcggctgatgcgtttcgcgcgcatgggtatatctggctggggacggaagatccttttaaagaagaatacaaacggtgggtgccggacacgccggatttggagcctggggcaaatgctcttttaaaagcgagagaaaaggcgctgaaagaggaggaaaaggctgatgcgaaagagctgaaagcggaaatatccaaactgggcattaccgtgcgggagaaaggatcgcgccaatattggcggatctatcaaacgccgtctgcataaaaaaagctgccgccgtttgatacggccgggcagcccgggaacagattatttcttcttgtcatcataatattgaaccgggtacatggagccttcggataccattttgttatcttcaatatcttcgggatgcgggttgcctgctttgttgacggggaatgattcaatatcctgcttcccggagagcgatgttttcatattgcggataaagttcatcaccttttggcggtttgatttatctttgagcaggtaggaagtcactccgacagtcgacacggcaagtcctgaaatgagcagtttttgtttcacgataaaaactcctttctatttctggcttgcagtagttattcccgcttaacggctgtttaaacatcggaagggtaattttggctttctgctttaatgcgataaagattgacaaaactattttcagaataatattataaatatatgatagcgctggagtcatattttaattgaaaggtgttaactttatgaatcaattacatcgcagaatgggaacgtttgcactcatgatggtcggacttgggtcgatgattggctccggttggttattcggggcgtggcgggcggctcagattgcgggacctgccgcaattatttcctggattatcggtatgatcgttattttgtttatcgcactttcttacagtgaattgggttcaatgttcccggaagccgggggaatggtaaaatatactcaatattctcatggatcatttattggatttatcgcaggatgggcaaactggattgcgattgtttccgttattccggtggaagcggttgcgtctgttcaatacatgagctcatggccgtgggaatgggcaaaatggacaagcaatctcgttcacaacggcactcttacgggagaggggctcggcttcgcatccgtattactgattatttactttttactgaattattggacagttaacttattttcaaaagcgaattcattgattaccatctttaaaatcattattccggggctgacaatcggagcgttgctgtttaccggttttcacggcggaaacttcacatccggttcaagcattgcgccgaacggctgggcaagcgtgctgacggcggtggccacatcaggtatcgtatttgcgtttaacgggtttcaaagcccgattaatatggccggagaagcaaaaaatcccggcaaatcgattccgattgcggttgtcggttcgttgctggtcgcaaccgtcatttacgtcctattgcaaatcgcatttatcggtgcggttgaaccttccatgatcgttcacggctggagtcacctgaacttcaactctccatttgccgatttggcgatcgcattgaatatcaactggcttgtcattattctttatgcggatgcgttcgtatctccgtcaggaacgggtattacttataccgctacgacgtcccgcatgatttacggcatggaaaaaaataaatatatgccgagcattttcggaaagcttcatccgctgtacggcgtgccgcgccaagcgatgattttcaacctggtcgtatcgtttatctttctgtttttattcagaggatggggcgtgcttgctgaaatcatttccgttgcgacgctgatttcttatatcacgggtcccgtgacggtgatgacgctgcggcggacggcggcggatttgtaccggcctctccgtctgaaaggcctcagcgtggttgcaccgctcggcttcgtgttcgcgtctctcgtgctgtattgggcgcgctggccgttaacagggcaggtgctgtttatcattttgatcggccttccgatttatttctactaccaagcgaaagcgaagtggaaaggattccgcagaaactttaaaggcggggtctggatggttgtctatctgctcagcatgatggtcatttcatggctcggaagtgaaaaattcggcggtctgaacatcattccgtacggctgggatatggggctgatcgcaatcgttgcccttgccttctatgcgtgggcgctgaagagcggattcaagactgagtatttgaaagacgccaaagcaatcaatgatcaattaaaaggcggacaggccgaagccgctgccggaaaagagtaatgattaataaaaaccttgcgggaacgttcccgcaaggttttttgatcgggcaaaaaaacatgggttcgatacagacgtgacgatgaatgagaaagcctaacgacaggcaaccagggacagtattctttttttctcatgatttctccgccttatcaataactgtcttccatactaaagaatgaatctaaaagatatgttgggcaactattaatcttttatgtttcttcttctccatgcttcatctttttcctgtactccaaagtcaaagttttagagacaaaacaaataattaaccatagaataaatacagtacgtaagttgagattacaataattgtataataaattaaaatataggaaagtaaatagttagggataataagtatgaaaacgcgaaaattaggactgggcgtctacccaagagacatcagagattccgattatacaaaaactatcaaaacatttagatgaattattttcactccctaagtttatttagggagtcatattattttaaggagagagattatatttgaacaagattaagtggcttattataattgcggtcatagtattaataggtatatttatatgtattggaacttttaaatatactaattcagtttctaatgttaaacaaactgaaaaagaaaaggaaaagtatttcttgaatgataaaattgcagctatatattattcagctacaatagattatcctaaagatgggagttatactgtatacattgatgaaaaaggagcagcaacagctgtaaaaggagatgctattgaggttggaaccattgcacaagatgaaaaaaacatagttagacaggacaaaaaagaagtttatatgataggcgataactttaaaaaattcccgatgcaacatcaagtacatacaagttatgggcaatcatcaggccatttaataaaagaaaatatcttttattttttgaataatcaaggagtcggtgaaaaccattataatagtttaattagatggggtaacggcagtggatttcatgaaaagattattccgggtttctatacaagtactggtaatgacggtgaatatatttacgtgataaatgaagattcttcaattaaaacaccgacttttcagggtattaaaatagataaagataaagttacagtagggaaaggaacaacaattcctgtattaaatgaagaaaattggagtgtttattcacaaataatagttaaaaaaggctcagccttttttatactatataaccaaacggataaatcaaacaaagtacaattcaaagtagcagaaattgatttaaagcataaaaagtttaaaggggcatatcctttaggcagttatcatatccctgatgaaatttctcaactggcaattcctctttccactaataacttttttgtgaaaaatgacactttatatcatttggcagctaattcaatactttatactttcgatctgaaaagtatgaagccgggaaaaaaaatcccgttaaataggtcgacaaaatttgaaaaccaagcaaaattcacttattttgacgagtctaaaattttcttgttagaaataagcaagggtgggaaatatgtgattaattcttactcttataaaaacggaaaaaaattaaaatctactcctgtcagaggacttgaaaaaattattaacaatacccatgtttctgaatatgacttttttatgattaagaaaaacaaagaagtttggagtgattagatacattttttaaatcgctagacagctgagtgagtatatttaaagggaaattaaattcacaaaggagaataataatggatgagctagatcttgcttttggtattttaccactttctattatcgtcttatcgattatattcacttatattttcaaaaaagtctatataatgccgcttgtcagtatagttgtttcagtcatattaatgttcactgtttttaatctatccttctggggatgggtggttgtctatggtttagtatcacttgtattatcgtctattacaaatagtataagaaagaaactagataatagaaataaataattatattcctttgtttaaaaaggtatcacaagtaattcatcattacagtgatacctttttacaattaaggtgagtctcagccttttaataatatgctccgcccgctacataacccatgatggcgtttgcatgatcgggcaaaaacatgggttcggcatcatctccgaacccatgctggctttatgatttgtattcttttttaaccttttggaatatatccgcatagttggtaaacacaccggttacgccccaattcagcagacggcgcatgtccgcctcgctgtttacggtgtaaggatgaagcagaaggccgtggctgcgaatgtttcggacattttgagcgttcagcgctttgtaatccggtccgattccgacggcatatgttttaatgtccgttaaatctgcgttagtcattgacgtcatctgttccgcttcaagtaattggacggcgggaagtttcggatcgagctgtttgattttcagaaggctgtccctgctgaaagactgaatgataacttgtccaagtttcgcatgcttacctgccaatttgtattttttcagtgaagcgatcagtttttcttccatacccggatatgtttcgggcgcctttgtttcaatataatagtttgcatgtctgccgaaccgttttaacacgtcatcaagtgtgggaacgcgaagtccggcgtattgcggttttgctttttccggataggccttattgaaccaagagccggcgtcgagcttttgaatctcggctaatgtatgatccttcacccagccttgtccgtttgtggtgcggtccagtttttcatcatgcatgacgatcagcttgccgtcttttgtcatttgtaaatccagctcaatatagtcagccttcattttttgcgcagtttcataagaaaggatcgtgtgctccgggacataccccgaagcaccgcgatgggcaatggtcaaaattctgtcaggagacaagaggtttccttttcccgctgccgatacaggcgtgacgatgaatgacaataaaccgaatgaaagcaataccaaagcaaacaatttatgtttccgcatgttttcttcccccttaaaaatcaatatctgtctctagtgtagaaaatcgttgtaaatgctgtactgcaaaaatattaatcttttatgttgttttcttacacatgctccgcccgcttgcccgtattccacgtcatagccaagaagacgatggacagcacgcatgaggagataagcatgataaagccgccgttccagtcaaagcggtctacgacataacccatgatggcgttggcgaaagcagagcctccgatgtagccgaaaaacccggttaagccggctgccgttcccgccgcttttttaggcgcaaggtcaatggcctgaagcccgatcagcatgacaggtccatagattaagaagccgatgctgatcagcgcgatattatcgatgagcggatgaccggcagggttaagccagtagaccaatacagcgataaatacgccggccatgaacagtacgcctgccggcgcgcggcggcttttgaaaaaccggtcgctgatccagccgcacaaaatcgttcccggaattcccgcatattcataaaggaaataagaccatctggaatcttcaggagagaaccctttcgcttccgtcaaataagtcggcgcccagtcaacgacaccgtaccgtacgaagtaaacaaagacattggcaaatgcgatataccacagaaacttattattcagcacgtatttgaaaagaatttctttggtcgtcatctctttttcctggtctttgaacgcatgtttcggatagtcattccggtattcttcaatcggcggaagcccgcaggattgcggcgtgtcccgtacgagaagaacaatcacaaatgaaatgacgatggcgataatcgccggaaagaaaaacacgcttttccaagtaacaaacatggcgatgccgagagtcacgagcggggcgagaatacctccgcctatgttatgggcgacattccatatcgacattttcgtgccgcgttcactgatggaaaaccaatgagccatcgtccgtccgcaaggcggccagcccattccttgaaaccatccgttaataaacataaaaataaacataatcgtcacgcttgacgtgacccacggcatggaaacaaataaaatgtttaccacacctgacaaaaacagacccgtcgcaaggaaatacctcgggttgcagcggtcagacaccatccccataataaatttactgaagccgtaagcgattgatacggccgcaagcaccaagccaagttccccttttgaaaacccttgttcctgaaaataaggaatagcgaaggcaaagtttttgcgaagcaaataatacccggcatacccgatgaaaatccccaaaaatacttgcagcctgagccgcttataggccgcatccgtctttgaatcatccaatctctcaatatgcggagccggcttaaacaattgaaacatcatatcctcccctttgctgaacgtctatcatgatgtatgtatgactcctttccttgaaaatgacaaaaagaaccagaaatcacccttgtgaaagggcggggtttcctggttctcctcatctccatccaaaaatcattaacttgtgtatgatagcgctttcttaaattatcatagtctgacgtgaatgtaaacgctttaaggaaagttttcatttttttgaataaataaccggagggaaaatcagccggagcgcgaaagatttgaagtactcgattttgtactcaggcataagatgtgttaggccggactaagaaaagcgaagggagtgcatctgttgattgatgaattggattttgcgttcggtgttctgccgctttgtatcatcatcttgtcagtcgccggaacgtacctgtttaaaaacgcgttcattatgccggctgccgctttggccgtttgccttatatgcacctttaccgtattgaatttctcgtttatcgggtgggccgtcgtgtatacgcttgtctctttcgcgttatcgcatattacgatggtggtgatcagccaaaataaaaaataggatcggcggcagccgatccagctatcataagcagagatgcgctctctgctttgttttatttatgaatgtgcaggaattccttgatgaccgcggtctgttcttctttcggatagcttctgtacagatggctggttaagcggacggggtcaccgaagaagtaccgctcatattgtgtctgtcttgttccgaaggggctcatggtcaaatcccatgcgaggcggaacacttttacccggtcctcagcgttcaattcggccgcctgcaaatattggtcaaggtctcctctgatgtcagaacggaacgctttttcagtcggcaaagtcaccattccgcttgccccgatcagctgaatgatttccgtgaagcgcgggtagatgtcgggaaaaatcgcgctgaccacacgaagcggagtgacactcggacgcatataaccccattcatctgtttccgcatcattctccgacttttccaaaagggctttcatcgtttccagaccggtgatgatttcagccatcttagcctgaatatgctgatattcgcccacatctatcgcttcgacaagcgtttgggcgaggcccaggagaaactccgtctttacaatttgtctcgtgatgacttgatgaaatgcgaaggcgttaaaagagcttttcatattaaaatcaaaagccgcctcgtaattattataaaaaaatacgcgttcccaagggaccaaaacgtgatcaaatacaacgatagaatccatttcttcatatcttgagctgagcggataatcaaacgatgattttccgagtacgaaagattccctgcagatgaattttactccctttgtattggaagggattgaaaaagcgaacgcttcatccgattcaaaatacattttaggcagagaaaccacgagcacttcatccgtcaggccgccttgtgtggctaaaatccgggcgccgtgtatgatgaggcctttttcatttttatcgacgacttttgccgagataggtgtcggcgatacgtttacacccatttgtgaacgattcacctgaggggtgataaacgtgtgcgtaaaagaaagatcctgtgcagcagcgcgttcgtacagcgcttgaacatgttccggaaaacaatgatcgcggtctttcaaaagcgcggcagaggaggcgaagctcatcagcacggtattcatataatccgggcttcgtcccatcattccgtgcgtgtgtctggcccaatgttcgaacatgtttcttcttctttttacgtcttctttcgttttcggctgcaggtatgaaagcccggcccgttcttttttaccgggaagactgtaagtcatttgatctttcatgtccggtttcgtttgcaaatcataaagagagcgcttcgtttccagaaggcccttaaatgcgggatgttcagaaatctgtccctcgatcttttcaccatcaagccaaatctcatttccaagctgatttaatcggtcaatgaacatttttccattaatgatacccatcatgtcgcccttctttctttgcagatccactacctcattatattgaaaacgaaattgggtgttccggttatttccaaaggggaagagccttttttgataaggggggtgacgggatttcataataaaaaaaccccttaagcagaggggtttttaactgatcatgtctttgtatcgttgttcgaggacaaagtctatcattccggtgatacgggtgttttcagatttttgtctgaaacggtcagacacttggatttttcttgaaaacggaaatacagcaataacccaaacaaggccggccaggccgaaaaccatctgcagagccatttcaatcaaatcattaaaatgagtgctgaaaaaaaagatatataacgtgatgaatgtgactgtacatacgattttgacagtatgttggaaggtgaggggcggttcagtgaaacacattttcatttgattcagtgtgagcgaatcttgtttcattaagtatgtaagcagttctttgtcattttgacttcgcggaatcaaatcggtttctattttttgaacggtttccttgtatgtctgcatatcaatcttcatgcgaatcctcctttagaaataactccaagaacactcattgagcattcctggagcaaggagctgcctgttcaattatagaaatagtgataaaaccgtgctgaacaaggctgcagctcctcctaattcaggtgctaaaacgactagagcaccgatccctacaataacaataattcctgcgcctgcaatagccatggtattcacgacagaatcccaatccggagagtacactttttcggaatccggcaacctgaagctcttttgttttattttaaatgtaatggtagttgttagtccagttgtagcactgtcaccgaccggaatatcagtataaattttaaattgaatattcagcgatcccgcagccggattgacatacacttctaaataaccgttgcggactgacaagctcagactgttaagcaggttttgataggaatcaatttgtgatgctgtaaaagagacttgtgaatcccccatcagaccggtaatataagctcccggtttgccatttgtaatggtaactgtgttgggagaaccttcgcttggcactgttgccaaaagtgaagtagataaaagaatatccatttcaggtgatgcataaatggtttctgtcttgtcgaattcaaacatggcattcgcaagattcgatatattttctaaagcaggaatggttgttaaaatatccgtcagtgtgcgcagtcttgcatcatacacaggatcagaaggcggatggacgctgcttgcacccgagtctttcccggagtatccgtctttgtcaatggcgacttttcccgctccgcttccgatcgttccttcataaaattgatcaaaagcccagtttttcggcatcgggtatccgaggttgccgctgaatccggtcgacatgttagccgtaaagctatatttggtcagacctgcttctgacgtccggatacaaatgtttctcggtccgtataccccgatttcatatttcggcgcagttgagaacgcctgcattttcataaaagctgacttgatttcttggaagtaaggaatgattttatccgtgacttcataatcatacgcatcgaaatcgaccgcaaagtaaatggtcgttcctgacggaaaacctaatcttcgggcggctgatgcagcgctgtacgcatctctcgttccttggtcttttacaaaataagaagattcatagccgccgtcctgataaatcggaaacacgcttaagccggcattgaaaatcgtggaaagttcttttgacgttaacgctttcgatgtcagtccgctgcttgtccgcacattcccggtcagatatcttcccacgatcttatagccattctcacgcaaagttttagccgtatctgccgtcaaaatggtagcggtgtcacaagctgaagcagcccgcgttgtgtcgcctgagcttgataataaagctttaatcgtcggcatgtccgcataaccggtctgcggcaggcacataaacttttggaaagctttcactgccgatacaactccgacgccgtattttccgtcgaattcaccgggatcaaacgcttccccattacagtaaagcgcgtattggacaatcaaaacaaagcctgtccgtgaatcgccgggagtcaaggtagggcataagctggtcgtgccgtttccgaaaaatccattggcgacgcttgtgctcatgccttcttctttttgcagggcataaatgagagccttgtttgtatcgcgggcgtataagccgtcacaaggcatcaagccgatgtagtcattgtaatcccggttcaggttctgctggatttggcggattcttttgtcgcctcccgctactaatcgaaaagcgctcatatccagcaaggctttcataatgagtgccgtgacgatgccgtcttgcttagtgagcccggccgctttttgaaactcttttacagccctttcggtattttcatagaaaacgcctgaaaatccgccggggttaaaacctttacaccacagcgccccctgcagaatgtaattcatgtttgtcggcttagaatcgggagcctgctttttcaacggcttaaacaatctttgtgtcgtcggtccgaagttatcggcaggttctgaaataccaagctcaatttgaagcgcccgtgtcagaccgtaaatggtatcccagcccgtttttccgttttccggcactttgttgtacccgtgtctgcctttgtacgtctcattcagccattgttgtgtttccaggaccatttcgtccattgcaatccctccattatgtgtattgtgcgttcattcataggtggcaaacgtatgacagtttgtcatgggtgcaggggtttatccaaggagagccccatcacggcagcagaacaaacgccgaaagagaggcattgataggaaaagacctcgctatgacaattgatacaaaaacaacaaaatgaatagcggtttaaagtaactttatcacttaatcaaaaatgacaagaatcataagtagtagtcatatagtcattttaagggctgttcacatctcctcctgcggtcaaaatggttagttggacggatttatgattggctatattgtcattaacataaatagggtaaatagttacaggaaggaaggattttctcgatgaaaagcaaaaagatttttaagtcgctcatcattatttttactcttttaatcagcggaattggttttatgggtttttcttctccgcaaaaagcagaggctaaagactggcttcatacttataaaagcgggtatttcactaactatgtgatcaatacatatcaccctaaattcactaaaacgacaaaaaagtacaccttgagagccgtgacttttaaatccaacagtaaagggaagggcacgtataaaatatacgtccaaaagcaagtcaacggcaaaggtgcctggaaaacaatcaaaaccgccaatgcaaagaaaaatggaacgacttattttgaaacaccttcgttgaaaaaaggagattcatacagatttaaattggtcaatcagggttcgaaaaaacgtgtcaattatagtgcaagatggattgtattcgcttcataatgctgatcttccggtctataaagttttagctgctgcagctgcggcagctttttattttgtccggagctcaaccgccagggagccagcacctgtctcttcgggcgtgcgtttgtatttcaccgcatcattctggattatgcggaaaggtacattgcttcaatgataagccaatccagggttcttttgattcgtttgaaaatgttctgatataaaaaaggcgtgccgcggtgtaaaatggctatattgataaatatggaggttgagatggatcaagattatatgactgagcttgtctcagtccagctgaagaaaatccggtcggagagaggctacacacaggagaaaatggcggatgtgatcggtctttctaaaaagtcgctggtgcagattgagaaagggcgggcgcttgcggaatggccgcatgttgtggcggtttgcgcgcttttcagatcaagtgaaacactgcaatccgtattaggagatgatccgctggaggtcattgaaacggttgctcaccgcacaattgacaggccgaaggggaagacgatgggcggcaaggtgtggtggaaagccatcgagaaaaaaggcgagttccgcttgcagcagcatttgatttcccaccattaccgcatccttgattcttatgatgatctgtggttcagcagttttgaaaaggcagaggctttggagcggcttgatgagctgtttttggaggcggaagaaacgaagcgctaagcacctccggttgatgtattttctgacaagtgggaaaatatatataaattccagccaaaggagagattcgaatgaagcctgaagatatcgtccgaagcggcccgaatcagtacatatgcaaggaaggaatcgcaaaagaacttccggggctgctggagacattcagaaaacccgttattgtgaccggaatcaaatcctatcaggcgttctccgattacggcggcggttcttcctgggatgtgattcagcataaaggatactgttcacctgaggcggtgcgtaaggtctgtgagcaggcggaagacgcggatgtgatcatcggtatcggaggcggcacgatattggatttggcaaaagcggcggcagaccggcttgatattgaagctgtgatggttccttccattgcggggacgtgtgcggcaagtacgccgttgagtgtcatatatgatgagagcggcaattttatcagagttgattatcataagcgttcaagctatttgacgcttgttgatccgctgtttttgctttcctctcccattgaatatatgaaaagcgggatcggtgatacgctggcgaaatggtatgaggccgaggcggtcatcagaaatacggaggcggcgccgctgatggcgcaggcgggtctgagacaggcggaatatatccgtaatctgttattgcgttacagtgaagcggccgtcggaagcatggagaaaggcgagctgtccgtgccgttcatccatacggcggaaacgatcattatgcttgcggggacggtcggcgggtatggcggccgtttgtgcaggatggcaggggcgcatgcggtccacaacggactcagttttcttcaggagacacatcaggtgctgcatggccagaaggttgcttacggcatattggtgcaactcgcgcttgagaatcggagacctgagattgaagagctgcttccgttttaccgccggctcggtttccccgtcagtctctgtgatctcggtatccttgacaaccatgaggaagccaagcgccgcattgcttctcacgcctgccgggcggaagaatcgttatgcttaatggggcaatatcgcgagaaggatgtgtcagctgcgattgaatcgctcgaatcagcgcaaaagacaggatagagcttgttatctatcttgtctttattttttgaatatttccgttataatgagtggggtatagaaagggaggggccaaaggacatgtatcaggcgaagaagatgttgttattaggatcaggcgagctggggaaagaagtcgtcattgaagcgcagcggctcggggttgtcactgtagccgttgacagctatgagcatgctcccgccatgcaggccgcgcacaaaagctatgtgattgatatgcttgataaagcgcaggtcagagaagtcattgagaaagaaaaaccggacttgatcgtgccggaagtggaagccattgcgacggatgagctgctgaagcttgaggaagaaggttttcacgtcattccgaatgcgcgtgcggcaaagctgacgatggaccgtgaaggcatcagacggcttgcggcagagacgcttcatcttccgactgccggctatgaattcgcgaatacatatgaagaatttaaagaagcggcggaaacaatcggctttccgtgcgtggtaaaaccgctgatgagctcttccggaaaagggcaaagcgtgtgccgctcggcttccgggctgaaaagctgctgggacatggcgatggaaggcggccgggtgaaaaacggccgggtcatcgttgaggaattcattccgtttgaatcagaaatcactcttctgacagtgcgcgcggcgaacggtacgtccttttgcgcgccgatcggacatgaacaaaaagacggtgactatattgaatcatggcagcctcatcatatgacggaacagcagatcaaagaggcgaaacacattgcgaaaagcataacggacgagctcggcggatacggtttgttcggggtggagcttttccttactgaagataaagtatatttcagcgaggtgtctccccgtccgcatgatacggggctcgttacgcttgtaacgcaaaatttgtcagagtttgcgctgcatgtccgcgcggtattgggattcccgattccggaaatcactcagctgtcgccgggggcaagccgtccgctgaaggcgccaaaagagcttgctgattatgcggttgaaggtttggaaaaggctttgggggtaaaaagcactcaggtccgcgtattcggtaaacccgtcacgaaagtaggacgccgtatggcggttgcgctttctgcagctgagaccgttgaagaagccagagaaagagcggccgaagcactcagtcatttatcaattacataaaatgatcttaaaaggcgtttttaccgtaatggtaaggcgccttttttgtttggcagactatatactggaaaacggggttgtgagataatgtatgaggccgttttgtgccggctttttaattcatgaaactttttatgtccgcaatcgttatatgtaatgttctcatttcacggagaaggaaataacaatacatcatacggcttttcattcatcaagaacggacaatccggatcgcggcatggaatatttaagcagggtaatccggaatagaggaatccatgattgcttaccttaatatgaacggcgaaaaaacaaaaatcaccagattagattgttcaaataacaccaaatgctgtataataaaagaatttgaatgatagcattgaaagaatttcattttatgtttccgtaaaatggagcctttatgtatacgcagtccgatttgatatggttttaattggaggtttgtgtaaactgtgaattatatacctagtatgattacaattggaaattttatttgcgggctcttatcgattcattcccttttgtatcataatatacactctgcggtgatctttattttcaccgggatgtttcttgacttctttgatggtttggccgcccgtaagctgaacgcggtatcggagatgggaagggagcttgactcttttgctgatctcgtgacgttcggcgttgcgccgtccatgctcgcttacagtgtttcactatatacgattccgttcatcggaattttaatcgcgctttcctacagtatctgcgggatgatccgtctttccagatttaatattgaacaaagcaagctgccgacgtttatcgggatgccgattccgtttgcgggtatgtgtcttgtcattttgagctttatcaataacgcttttcttctgggggcgggaacgatcgcgctcggttatttaatggtcagcaacattaaatttccgcactttaaaaaacaggcgcctgaaaacctggagagcagaagatggaattagttcagcaattaatatccgattacggatatatcgcgatttttcttatgctgacactcggtattatcggattgcctattccggatgaagtcatgatgacgcttgtgggctacttcgctcatttaaacgtgctgaattacgggctctccattctgatcagctttatcggagcgcttctggggatgattatcagctacttcatcggcagaaaagccggccggccgtttattaataagttcgggaaatgggtcggcctgaaggaaaagaggatggagaaagtagacaggtggatgaagaagtacgggccgtacaccattattttaggttatttcatccccggcatcagacacgtgacctgctacttttccggaatcggcagaatggaattcaaaacctacttatgcttcgccgccatcggagcgtttttatggtgttttatttttattactataggaaaattcataggagtaatcaatgtttaatactgccgctaaagttctctaccgttcattgattgaactgactaataatcgattgacgtcttatctcattaaaaacttctgtgaatcgaaactgagcaagccgatgattccgctgttttccaaacactatcgcatcaactggaatgaaacggaacgtacggcttctgactttgattcactggcgtcatttttcattcgtgatattaatttaaatctccgccccgtggcaaaagaaaagaacgccatcgtcagtccggtggacggtgtcgttcagacggttggcatgattaaacccaatcaaactttcatggtaaaagggaaggattattcgttcgccgaactgacggggtttaaaagcgccgatcacaagtataacggcgggtgttttgccgtgctttatctgagcccgagacattaccaccgcttccattctcccgtcagctgcacgtatcagaagctggccgagctggggaaacgctcctatcccgttaatacgatggggttaaagtacgggaaagacgtgctctcaaaaaattaccgttatgtgtacgagctgacccgtgctgaccagcagatgctcatgattccggtaggtgcgatgaatattaactcgatcgttcagacaaacaccggaaacaggcttgagacgggggaagagctgggctatttttcatttggatcgaccgttattttagtattcgagaaagatatgtttaccccttcggataacctgactgaaggccgtgaattacaggtcggccagatcatcggttatgcggagtcacaggaggaggcgtccgctttataaaagctgctcctcttttttatatggtgtaaggaagtgaacattatggaagaaaaggatttggcaaagctgatagagcagtaccagcatacaggggatcagcaaattcttgaagccgtgcgggacgcatgccggcctgtcgttgaggcgctcatctcagaactggctgaagacagcgccgatcttttgcgggcaaaaggccgtgaccgttttccgtttattatcggcaagtatcagaccgcggccggcctttcgcttgagacctttttgcgcaatacgtatcggttttattttcagcaggttttaaaaggcgaagcgtgactggaagaaagagtacggacggaaatgttcatctttcgcccgttttcctgtatgatatagtagagtgtgcgatcattaatataattgaacagggtgtataaatcatggaaaaacaatatagagttttactttattataaatatgtaaagattgatgagcctgaggagttcacggctcagcatttgaagttttgtaaggagctcggtctgttaggccgtattttgatttctgaggaaggcattaacggtacggtgtccggaacggttgaacagacggaacaatacatgaatgcgatgaaagctgatccgcgctttgccgacatgccgatcaaaattgacgaggctgacggacatgcattccgcaaaatgtttgtgcgccataaaaaagaattggtgacgcttcgtctcgaagatgatgttgatccgaatgtcacgacgggcaagcatttgaaaccgaaagacttttatgagcaaatgcaggatcctgacacgatcgtgattgacgccagaaacgactatgagtatgatctcggtcatttccgcggagcggtcagacctgatattgaggcgttccgtgagctgccggactggattgaagagcataaagacatgcttgaaggcaaaaaaatactcacgtactgcacaggcggcgtacgctgtgaaaaattttccggctggctgctgaagaagggctttgaagacgtgtcccagcttgacggcggtatcgtcacttacggtaaagatcctgaagtgaaagggcaactgtgggacggacagtgctacgtgtttgacgaaagaatcagcgtaccggtcaaccgtgtagagcacgttatcatcggaaaagattatttcacgggcgagccgtgcgagcgttatgtgaactgcgcaaatccggcatgtaataaaaaaatgatctgcacacctgagaatgaatacaaatacatgcgcagctgcagtcacgaatgccgtacgaacgaacgcaacatgtatgtgaaagagcacgaaatgactcaggaagaaatcaatgaacgccttgctttgattgaacaagaggatcatgcggcgattgattaatagaaaagaccaccaataaggtggtcttttttgtgtttacatactttctgtccgggcggtctggtctgccgtgacgggtcctttatatttgaatgctttttcccacttggacacgacaatgcaggcgaccgcatggccgggcacgttaacgccggttctcgccatgtccatgacgcggtcgacaccggcaatgatggcgacgccttccgcggggagaccgacggcattcgctgtcgccagaagcacgacgagtgagcctgacgggacggcggcaatgcctttgcttgtcatgacgagcacaagcatcatcagaagctgctgagaaagcggcatttccacatgaaacgcctgtgccagaaaaatacaggacaccgataaatagaggcttgagccgtcacagttcagcgataaacctgacggaaccacaaaggagacgacccgcttcggacagccgtatttctccatccgatccatcagctgaggcagaatggtttctgtgcttgtcgtggagaaagcgatcaaaaacagatcccaaatcattttcagcacttcaaagtatttgattttaaagataagccccacgatcggaaacagaacgaagagtatcaggaacagcccgaggaacacagtgccgatcagcttcagcatcggaagcaaaagcgcgattccgaattgcccgacagaggcggccatcagggcgagaacgccgatcggagcggtgaccattaccatttgcgtcagcttgaacataatatttgccgtggattcgaagaaactcatgacaggtgcggaggctttgccgatgccggctgcggcaacaccgaataaaatcgcgaaaaaaatgacggcgagaagatcgtttttcgccatgacgtcaatgatgttaacggggataatatcaagaagcatttgtttcaggtcgactactttttccgtatagccggaaagctcgtgaatatcttttttagcaagatgagagaggttaagtccgactcccggcttcagcacgttcgccaataacagaccgagcgccagaacaagcgtcgtaatcacttcaaaccaaataatcgttttgatgccgagactgcccatctttttcatactgccgctgccggcggctccgataacaatggtcgaaaacacaatcggcacgacaatcattttaatcaggcggataaatccgtctccgacgggccgcagcgccatcccgaaatccgggaagaagtggccgatcaatgctccgatggctaaagcgatcaaaatctggaatgcgataaattttttcaagcgaatcccccttttacttgcgcatttcatacgtaattcgtgaagcaggcggcaaccaccttcctattcgccataaatttgtcacatgattgactgtgcgaaagaaaggattgctttacattatgtaagcgcaatcatttaatatgacagaaagtcctcattgaaaaaaatcaagcagaataaaataaagttagattttcgcttgaaaatatcaaaaattttgataattatcctcttataagtggtatatttgatatgatacggtcaactgcatcctcatatatctgtgcatacacgattcaggcagagaaaacaggcagcttacaaaagactgaaaatttgaacaattacaagaaaggtgtgcttttgttgaatcaactgattgaaagacgtaaggtcacagcaagaaaagaaaaaccggactccgcttcattggggtttggcaagtacttcacagattacatgtttgtcatggattacgaagaggagagagggtggcatgatccgagaatcaccccttatgaaccggtccatctggatccttccgcatcggttttccattacgggcaggccgtatttgaagggctgaaggcttacaggtcagaagacggccgggtattgatgttccgtcctgaccaaaatataaaacggctgaataaatcgttacggcggatgagcatgccgcctcttgacgagaagctggcgctggaggcattgatacaattggtggagctggagcaggaatggataccgatagaaaaaggaacctctttatatatccgtccgtttgtaattgcgactgagccttctttaggcgtccggccgtcaaagcgttacaagttcatggtagttctgacgcctgtcggttcgtactacggcgatcagctgaaaccgatccgtatttatgtggaggatgagtatgtgcgtgccgtcaccggcggagtgggcgacgtcaaaacgtccggaaattatgcggccagcttacaggctcagcggaaagccgaagaactggggtatgatcaggtgctttggctcgacggggtggaaaagaaatatgccgaagaggtagggagtatgaatatctttttcatcataaacggagaggccgtaacgccggcgttaaacggaagcattctcgggggcatcacacgcgcatctgtgatagagctgttaaaaagctggggcatccgcgtcagggaagaacaggtcgccattgatgacatctatgaggctgcgatgagaggcgaggtgtcagaggtattcggtacaggaaccgcggccgtcatctcgccggtcggcgcgctgcacattcacggagcaacgattgaactgaataacggtttgatcggtgaagtgtcagaaaggctctatgaaacgattgccggcatccaagtcgggaaggtgcgggattcgttcagatgggtggttgaagtataaatgaaaaaagaacccttgcgcgggactgacccccgtttttgagacagggatcaaaacacctttaagcagccagctgtcggtatgtgaccggcggctggttgtttagtttcgtttgaatacgaatgttgttataatagtgtatataggtttcgacagtttgttctacgatggtcgtcgtagtgctttccaacctgtcgaggtagaacgtttcagactttagtgaggaatgaaacgattcgatggaggcattatcagcgggcgtccctttgcgggacatgctcatggtaatgccttttgttttaacagctttctgatactcataagatgtataaacagaaccttggtcactatgtaacacacagttctctggcagtgcgggcagctgatcaagtgtgtgtaagacaaagtctgtgtcctgtctatcgccaatcgtaaaagcaatcacttctccattgtataaatccaatatactggaaagatacaattgtttctgcccataaggcaaatatgtgatatccgttactagcttttccagaggacgatcagactgaaagttccgatccaatgcatcctggggctgtagtcggtcccaagggttgggctgttcgcccattaaagcggtacgcgagctgggttcagaacgtcgtgagacagttcggtccctatccgtcgcgggcgcaggaaatttgagaggagctgtccttagtacgagaggaccgggatggacgcaccgctggtgtaccagttgttctgccaagggcatcgctgggtagctatgtgcggacgggataagtgctgaaagcatctaagcatgaagcccccctcaagatgagatttcccattccgcaaggaagtaagatccctgaaagatgatcaggttgataggtctgaggtggaagtgtggcgacacatggagctgacagatactaatcgatcgaggacttaaccaatttgaatgtatgcttactgttatctagttttgagagaacactctcaatggtttggtggcgatagcgaagaggtcacacccgttcccatgccgaacacggaagttaagctcttcagcgccgatggtagtcgggggtttccccctgtgagagtaggacgccgccaagctatcattacggtaaaggcagctcatcatgagctgccttttttgtttataagtattgcttcaggaaattagaaacgtaatacggaaattttcgttccgtgacctctaagaaccggcggatcatcacataatcatcactgacatgctgtgtcagcagttcataccaccactccgtttcatatctcgcaatcatcccgatattgtagaggaccaaataatgaataatcatttccggaagatggaggaagtgatcacgctgagagggaatgtaatattgatttttctctaagtgaaacaataaatttggcgaagaccaaggttctctgtctatcgggtcagcctcaaaaaccaagtggttatggtctttcctcagaaaagaccacttcaaatgatggctgatatattcagcaaagcgggaatcagacatattgtaatgaatcaccgcatgctcaggcactgaaataaggtcatctttgagctctactcgggtcagccaattctttttctcttggaagtaaaagacagtatgcaattcaggtatggctgtcagcaatttcttcattgtgtaccgttcttcctcaagaccagctatcccgaataagtgcttcattacatgaatacataagccattgcgctgcaccttcacttcatcatccctaaaggagtaattttgctttttgcgtttccgggcagtcacgccatgcgcgagtactgaggcatggcttggatagcttggatctgtggtcagaaggcaggctttcagcaattgtgacatcccgtaaaacaacagaataggcttaatttctaaaggggaaagagatgcctgcttataaaaggactcggcgtgtttgataaagaatatgaagcgctcactgttcttaaacgcatatcgttttggttcttccataccgctttctgtatagattttatttagaaatttctgggaagattctacggaataaaataatgataactctttccactcatgatctctcatatgtatttttaaaccctttcctttatctaaatatttcaactctttttcgcttccttgacatgctgttttctagttgataatctacatataatattttgccgaaaagagggggatttactaatgtgggaaagtaaattttcaaaagaaggcttaacgttcgatgatgtactgctcgtaccggctcaatcagacgtacttccgcgtgatgtggatttatctgttgaactgacaaagacgttaaagcttaatattcctgtcatcagtgcgggaatggatacagtaacagaatcagctatggcgattgcgatggccagacagggcggcttgggcattatccataaaaacatgtccatcgaacagcaggctgaacatgttgacaaagtcaaacgttctgaacggggcgttattacaaatcccttctttttaacacctgatcatcaagtattcgatgcggagcatttgatggggaaatacagaatttccggtgttccgatcgtagataataaagacgatcaaaagcttgtcggtatcattacaaaccgtgatcttcgctttatctctgattattcaatgaaaatcagtgatgtcatgacaaaagaagagctggttacggcttctgtgggaaccacattagacgaagcagaaaaaatcttacagaaacataaaattgaaaaacttccgttagtggatgaccaaaacaaattaaaaggtcttatcacgatcaaagatattgaaaaggttatcgaattcccgaattcatctaaagatgaacatggacgccttattgtcggcgctgcggtaggcgtgacaggcgatacaatgacacgcgtcagcaagcttgttgaagcgaatgtcgatgttatcgtggttgatacggctcacggacattccagaggcgtactgaacacagtcgcgaaaatccgtgaaacatatcctgaactgaacattatcgcaggaaatgttgcaacggctgaagcgacaaaagctctgattgaagccggagcaaatattgtcaaagtgggaatcggacctggttctatctgtacgacacgcgtcgttgcaggtgtaggcgtaccgcagatcactgccatttatgattgtgccactgaagcgagaaaacacggtgcgacaattatcgcagacggcggtattaaattctccggagatattacgaaagcgttggcttcaggcggacatgccgtaatgctcggaagtctgcttgccggtacttcagaaagcccgggagagactgaaatctatcaaggcagaagatttaaagtgtatcggggtatgggttctgtcgctgccatggaaaaaggcagtaaagaccgatatttccaagaagaaaataagaaattcgtccctgaaggtatcgaaggacggactccgtacaaaggtcctgtagaagaaacagtgtatcagcttgtcggcggtcttcgttcaggtatgggatattgcggttcaaaagacttgcgcgctttaagagaagaggctcaattcatccgcatgacaggtgccggacttcgcgaaagtcatccgcatgatgtccaaattacgaaagaatcaccaaactacacaatctcataattgttacaaataaaaaacatttgacagggtcgctgactctgtctattttttttatatcgagtgtgataaaatttatactgttgtgttttgaatttgaatatgtccttaacggcttaattatagatttaaaatgaatgacggaggtcgtaagattgaacatcacgaaatggaaacagctgttggtgtcattagtggtactggcactggccgcaacttgctttgttccaatgtctaaagcggaggcagccggcaatgacccgattgatgtcaacgcatcagctgcgataatgattgaggcttcatcgggaaaaattttatacagtaaaaatgcagacaaaagactgccgattgccagcatgacaaaaatgatgactgaatatctgcttctggaagccattaaagaaggaaaagtgaaatgggatcaaacgtatactcctgatgattatgtctatgaaatttctcaagacaacagtttatcaaacgtcccccttcgaaaagacggcaaatacacggttaaagaactgtatcaggctatggcgatttactctgccaacggagccgcgattgcagttgccgaaattcttgccggaactgaaacgaaatttgtcgctgaaatgaatgcgaaagccaaagaattaggcatgacaaactatgattttaaaaatgccacagggcttgtgaatgaagaccttcacggcaagcagccgcaaggagaaggcgttaaagaagagagtgaagtttctgctaaagacatggcgcttcttgcagaccgcctgatcactgattatccggaagttctcaaaacaacaagcatcgctaaaacgaaattcagagccggcactgatgatgaaatggacatgccgaactggaacttcatgttaaaaggtcttgtttctgaataccctggcgttgacggcttaaaaacgggttctactgattctgcgggatcttgttttacaagcacagcacagcggaacggaatgcgggtcatcacggttgtattagacgcaaaaggcaacctgcataccggacgttttgatgaaacgaaaaaaatgctcgattacgcatttaacagcaatttctccatgaaagatctttaccctgaaggctctcaagtaaaagggcacaaaacgattgacgttgaaaaagggaaagacaagcaagtcgatattgttactgacaaggcgctttctattcctgtgaaaagcggggatgaaaagaactataaagccgaagtgactttagataaaaaagaaatcacggctcctgtgaaaaagggaacgaaagtcggaacgctgacagttacatacaaaggcagtgacaaagactatggcttcctcaaatccaaagagttcagcgtgaatcttgtaacgaaaaatgatgtagataaagcaaactggtttgttcagatgatgcgcggcatcggcggattcttctccggtatctggaacagcgccgttgacacggtaacaggctggttttaagaaataagaaagagctctgatgaaagttagggctcttttgcttaatatactgaaaaaaccaaattattagtaaaaaaatgatatctatcttattcatctcgctgtaaaataagaatacccatatgaaatattgtatttctgggatacaataagagatagaaattatctaactatacattgactagggggaccaaataatggctcaaacaggtactgatcgtgtaaaacgcggcatggcggaaatgcaaaaaggcggcgtcatcatggacgttgtaaatgctgaacaagcgaagattgcggaagaggcgggagctgttgccgtaatggcgttagaacgcgttccggctgatattcgcgctgccggcggtgttgcccgcatggctgatccgacaatcgttgaagaagtaatgaatgctgtatccattcccgtaatggcaaaagcgcgtatcggacatatcgttgaagcgcgtgtccttgaagcaatgggagtagattacatcgatgaaagtgaagttctgactccggctgacgaagaatttcatttaaataaaaacgaatatacagtcccgttcgtatgcggctgccgtgatctcggcgaagcaacgcgccgtatcgctgaaggagcttccatgcttcgtacaaaaggcgaaccgggaacaggaaacattgtggaagctgtccgccatatgagaaaagtaaacgcgcaagtgcgcaaagttgttgcgatgagcgatgacgagctgatgactgaagctaaaaacctcggcgctccttatgaactgcttcttcaaatcaagcgtgacggcaaactgcctgtagtgaactttgctgccggcggagtagcgacgcctgctgacgcggcattgatgatgcagcttggcgctgacggcgtatttgtcggttcaggtattttcaaatcagacaaccctgctaaattcgccaaagcaattgttgaagcaacgactcattacacagactacaaactgatcgctgagctttctaaagaattaggcacagcaatgaaaggaatcgaaatctcaaatctattgccggaacagcgtatgcaagaacgcggctggtaaaaccataggagagctggaagcatgttaacaattggtgtacttggacttcaaggagcagtaagagaacatattcgttcaattgaagcatgtggttcaaaaggtgtcgtcattaagcgtcctgaacagctgaatgacatcgacggcttaatcctgccgggcggggaaagcacgacgatgcggcgtttaatggatacgtatcattttatggagccgcttcgcgagtttgccgcccgaggcaagccgatgttcggcacatgcgccggtctgattattttagccaaagagatagcgggaacggataacgctcatctagggctgttgaacgttgtcgtcgagcgtaattcctttggccgtcaggtcgacagctttgaagctgatctgacgattaaaggccttgatgagccgtttacgggtgtatttattcgcgcgccgcatattttagaagccggagaagatgttgaagtgctttgtgagcataacggacgcatcgtggctgcaaagcaggggaatttcctcggctgctcgttccatcctgaactgacggatgatcaccgggtgacagagctgtttgtgaagatggcggaaaagcataagcaggaaacagctgtataaaacagttgaaaaccgctgatacttatagtacattataaacacaaataaagatcgaaaagcgttgacaggaagcagtaggaagcctctctttcaaagagagccgatgggtggtgcgaatcggtgaaagatgctgtccgaatccgtccttgagcgaaatgctgaaaccaagtaggcatttacgggaaaaccgttatgtgttaaagcgggaagcaagtgtgagcttgttttcaatcagggtggcaacgcgagagctctcgtcccttttaggggatgagggctcttttttattttcgataaaaacagataggagttgttaggcatgattgatacgaaggtgctgagagccaattttcaagaggtgaaagcgaagctcattccaaaaggcgaagacttatctgactttgacaagtttgaagagctggacgaaaagagaagagagcttatcggtaaagtagaagaactgaagggaaaacgcaatgaagtatctcagcaggtcgccgttttgaaacgggagaaaaaagacgctgatcatattattaaagagatgcgcgaagtgggcgaagaaattaagaagcttgatgaagagcttcgtactgtcgaaacgacgctcgaaaccatccttctgtctattccgaacatcccgcacgattcagtgcccgtcggggaaacggaagatgataacattgaaatccgcaagtggggagaggcgccggcattttcatatgagccgaaaccgcattgggatatcgcagaccatttaaacattcttgatttcgaacgcgcttcaaaagtaacaggcagccggtttgtgttttataaaggattaggcgcccgcctcgaacgcgcgctctacaactttatgctggatcttcacgttgatgaatatgattacacggaagtcattcctccttatatggtaaaccgtacgagcatgacaggtacgggacagcttcctaaatttgaagaggatgcttttaaaatcagagaagaggattatttcttaattccgacggcggaagtgccgattacaaatatgcaccgcgatgaaatcttatccggtgagaacctgccgatcaattatgccgcattcagcgcctgcttccgttcagaagcgggatctgccggccgtgatacacgcggtttgatccgccagcatcagttcaacaaggttgagcttgtgaaattcgtgaagccggaagattcttatgaggagcttgaaaaactgacgaatcaagctgagcgggtgcttcagctgcttgaactgccgtatcgtgtcatgagcatgtgtaccggtgatctcggctttacagccgcgaaaaagtacgatattgaggtatggattccaagccaagacacataccgtgaaatttcttcttgcagtaactttgaggccttccaggcgagacgcgcaaacattcgattcagacgcgaagcgaaaggcaagccggagcatgtgcatacattaaacggttcaggtcttgcagtcggcagaacagtagctgccatcttagaaaactatcagcaggaagacggaagtgtcatcattccgaaagtgcttcgtccttatatgggaaataaagaagtcatcaaaccgtaaaaggtgcgccctagaggcgcgccttttttgctgcccggtatagagcggcggcattccgggctgtgctttcaaggttaaaacggccggatgctaaggcgtcttcaagacttacagcgccgggcacgatagaaaatacagccgttattcctgcgctgtaaacatgctcgaaatttttgcctaaggagcccgccaatgcgataacgggaatttcttgagcagatgcgcgtgcggcgatcccggcgggggttttgccgaatatcgtttgtccgtctatctgcccctctccggtaatgacaaggtcagcgcctcttatctgatctgagaaggacagtgtatctaatacaacatcaatcccgctttgaagttctgcctgtaagaaagcgatcagtccggcgcccagtccccctgcggcgcccgcgccttttacggtatccgcttcgataccgtgctgacgtctcaatatgtcagcgaaatggcgtaagttgcgatccaatacaactttagtcttctcggatgcccctttttgcgggccgaagacatatgaagcgccgttttcaccggtcaggggattttcgacatcacatgcggcacggatacggatatgtttcagttcaggagagagaccgcttatatcaatagaagctagggtgtgcagagcgcctccgccgtcaggtatctcctgaccttcctcatttaagaaacgcacaccgagcgcgctcgccattcctgttccgccgtcattggttgcgctcccgccaagtccgatgatgatctcacccgccccgcgggaagctgcatctgctatcagttcacccgttcctcttgtcgttgtgatcaacggatctctgagatggcggggaacgagatgaagtcccgatgcttccgccatttcaatgactgctgtgcgtccgtctcccagaagtccatatgcggcgtttaccggcattcccagcggaccggtcacagtttttttgatgatgcttccgccagtggcatccgtcaaagcctgaacggttccttctccgccatcggccgcgggtatcttgatatattccgcgtcagggaggaccgctttgaatcctttttctatgctgtcagcggcttcttttgatgtcatgctttctttgaaagaatccggtgcaataatgattttcattatgttctccacctttatgagcaggttatctgtttgaatctattcttgatttttactgtgttttcctgcccgtatggcatactgaggttgaattggacgcaagacttttgtatgatagtaaagctgacggacaagacgtttaagaaatgaaataaaaaatatgaaaaagcgcttgactgaaatttaggtcatgtgttatattattaaatgtcgatacggaggaatacccaagtctggctgaagggatcggtcttgaaaaccgacaggggtgtcaaagcccgcgggggttcgaatccctcttcctccgccatattgattttaaacctaatgaaactcgagcatatattggagattgttttgtccgctgcatgtgatgcagcggattttttatatgcaaaaaaagcgattttctctgtccggggaaaatcgctttgctatttttatttatttctgttttcgttgatcacgtgactgattttttcgatcaaaggttccagtgactgttcatcagcttcaaggtcataatcttcaatgcgtactttcagcacagggcaggcgttaaaaccgctgatccagtcttcgtaccgtgtatacatctcttcccaataggagcggtttgtctgcagctccatctcgcggccccgcttttcaatccggtttataatgttttcaaggtcgccttctaaatagatcaaaacatcaggatgggggaagtacggcgtcatgaccatcgcctcaaatagacttgtgtatgttgtgtaatctgtcagcgacatggttcctttatcggcatgcatttttgcgaatatgcctgtatcttcataaatcgaacggtcctgcacgaatccgccgcctgattcaaacatatttttctgctctttgaaccgctcagccagaaaataaatttgtaaatggaagctccagcgttcaaaatcgtgataaaacttctctaaataagggttttcatccacttcctcaagtgaggtatgaaacccgagccgttttgctaaagctttggtcaaagtcgattttccgactcctaccgttcctgctactgtgataatggcgttgtttggaatatgaatgtctttcatttaataagctcctttacctgacgggcaattctttcatagtctgtcttattcaaaacaaagtcttcagtatcaccgtcaatggtcagtacagatatatccggatcttcttcctgaagctgtctgatggctgtgtcgtaatctgcaatgagacgttccagatattgatgctcgatatttttctcaaacgggcgcccgcgtttttcaatgcgttgaagcaatgtcggcaggcttgcctttatgtatacaatgatattcggtttcggcaggtcgtgagtgagcagatgataaatctgcttatatttctcaagcttttggccgtgcaatgtacgctctgcgaaaataacatttttataaatatgataatcggacaatacgggctgtccttgttttaaataatctcgatcggtgtcctcaagctgtttatacctgtgacatagaaaaaacatttcaagctggaaactccactcctcgatattgtcataaaacttatcgagataagggttgtcttccacaatctcattaatcataggaaaaccgagctcttcagaaagcatcgtagcgagtgtcgtttttcctgccccgataggaccttctaccgcgataaaaggggctctgttcattgaaaatcctccttaattctgcaaacatccgtcagctgccggcctttatattgtatcacactctcagaaaagcccatgaaaaaagacgcttccatttaacgaaacgtctcttttacaatatgaaattgatcgttgagcaaaagccagttttgcgggaaagaaaggccgagtttccaatagctgattcctcttaaatgaagttctttaattaaattgaatttcgcttgaatggatcgtgcgtcttcaaaccatacttcatgccgtctctgattttcatccgtgtatcggaagaatggagcctgggcggtttcgtcatattgaatgtcgactttatagcgtgctgccagagcgattgcctgctgaggactgacggctttggctgtcgttccctgtttaaaaggcagtgtccaatcatagccgtacatattttggcccatgacgatttttgaagaaggcatttccgtcagcgcgtactcaatgacatttcttacagggccgataggtgatacggcctgagccgggcctccgctgtacccccactcatatgtcatgatcacgacaaaatcgacgatttctccatgtgccctatagtcatgtgcttcgtaccatttgccggcctgagtcgcgctcgttttcggagcaagcgccgttgaaatcttccagccttcccgatgaaaaatcgtcctcgcttcacgtaaaaaacgattgtaggcttctctgtcctgtggacgtaaatattcgaaatcaaagtgaatatcgcgaaagccgtactttttagccgtggagacgatttcctgaaagagttttgttttcactgtattgtcattcaagatgagccgcccgagttcatcgctgaatgcgtcattttcaaggttggtgatgatcatcatcagtgtggtgttgtgcctgtcactgatgctttttaaattggtcagaggcggttcctttaaagtcccgttccgctgcacttgaaaactgaatgcgccgaggtatgttaaataaggagaggcctcccttgccgcctgctggagattagcgcttacgctcgttccccgcggttctatatatgcatttgattcgatatcgggcttattcgcctgctgcggaatgtaaaggcgggttccggctctcaatgtggtgccgggctgaattccgttcaccctcgcaagctccgcggccgatatatgaaaacggccggcgattgcagcgagagtatcaccttgtttcacttcgtaatattgaccctcaatcgggatgacaagggtttgtccgacaaccaatgtatttggattaggcagtttatttgcttccgcaatgacatttgcggcagtccggtagcgcgccgcaatagcggaaagcgtgtcgccccgtttcactatatagatctgaatgaaaaacgcctcctttcatatccgctatcaaatatatgaaaaaaggaggctgatcatgtttatttttcggcggtaatttgtttttccgtggttatttctgcgaagagaacattctccatcatggtcaaagcgaaatcattgtcttcgtcgttattggaagcggtgcagtctttcggaatggcaatgctgtattctctcatataggcgtcgttggccgtgaacagcacacaaatgttcccggcaatccccgtgatgattaatcggttcacttgtaattcggtcagaagggtgtgaagcgccgtttcgtaaaaagcggaatgcttcggtttaatgagaaaataatcatccggctgaggcgaaatatcttttataatgggggcgcttctgtcgttgctgcattcctccctgatggcatcaatatcagccttccagagcccgtaatgatcattaatataaataatcggccagttgctttgttttgcatgcttctttaatgataaaatacgggggacaatttgtttggttttttcagcaagacgttcgcccatatcaaattgaaaattgttgatcatatcgacaatcagaagggctgtgttgttaggttcagacaataccggcaactcctttctgcgggggtattcctattttaacctttatgagacatgaaaaaacttaagaagagagctcgaacctatgaatgatgaatattatatgagagaagccataaaagaagcgaagaaagccgaagcgaaaggtgaagtgccgatcggagcagttcttgttctgcacgatgagatcgtggcgcgggcgcataatctgcgggagactgaacagaggtcgcttgcccacgccgaaatgctggcgatagacgaagcgtgccgtaagctggggacatggagacttgaggatgccgttctttatgtcactttggagccgtgtccgatgtgtgcgggagccgtcgtgctttcgagagtcgataaggtcgtattcggcgcatttgatcccaaggggggctgtacaggaacgctgatgaacctcttgcaggaagagcggttcaaccaccaagcggaagtggtgagcggcgtgctcggagaagagtgcggagaaatgctcagcgcttttttcagaaagctgcgccggcaaaagaaagacatgaggaaaaagttgtctgagtagtacggttgcattttctgcctgaagcagatatacttatgtgtgcatcatgaatggtgcgcatataaaaatttgatatttattttgccgtgctaagcggggaggtagcggtgccctgtacccgcaatccgctctagcggggccgaatcccttctcgaggttcgtttactgtaaggtctgccttaagtaagtggcgttgacgtctgggtcctgcgcaatgggaattcatgaaccatgtcaggtccggaaggaagcagcattaagtgaaacctctcatgtgccgcagggttgcctgggctgagctaactgcttaagtaacgcttagggtagcgaatcgacagaaggtgcacggtaaatcaatcatcaaatttcagactcacctgtttatggcaggtgagttttttcgtatatgaaaaacgggttttggcgttaaaagcacgttcatgtataataaacatgatgaataacagaggagggcgcatcctgtgggttaccaagctttatatcgagtatttaggcctcagcagtttgaagatgtggtcggacaggaacacattacgaaaacgctgcaaaatgcccttttgcaaaagaaattttctcatgcatatctgttttctggaccgcggggaacgggaaaaaccagtgcagctaaaatatttgcgaaagcagtcaactgtgagcacgcccccgtagaagaaccgtgcaatgaatgtgcggcgtgcaaggggatcacaaacggctctatatcagatgtgattgaaatagatgcggcgtcgaataacggcgtagacgaaatccgcgacatccgtgacaaagtaaaattcgccccgtcggccgtcacctacaaagtatatattatagatgaggtgcatatgctctctatcggcgcattcaatgcgcttctgaaaacgctggaagaaccgccggcacattgcattttcatattagctacgactgagcctcataagattcctttaaccattatctccagatgtcagcgttttgacttcaaacggattacatccaaagcaattgtcggacgaatgaagacaatcgtcgatgcagagcagctgaaggtggaagaaggagcccttgatatcatagcgagtgctgcggacggaggaatgagggacgcgctgagcctgctcgatcaagccgtatcattcagcggcgaggagctgtcggtggatgacgcattgctcattaccggagccgtttctcagcactatattgggaaactggcatctgctcttcaccgcaaacaggtttccgaggcattggagacactgaatgaattgctccagcaagggaaagatgcggccaaactgattgaagatatgattttctattttagggatatgctcttgtaccaggccgctcccggtttagaaggagtcctggagaaggtgaaggtcgatgaaacgtttcggaatctgagcggtgacataccggcccccgctttatatgagatgattgatatcctgaataaaagccatcaggaaatgaagtggacgaaccacccaagaatcttttttgaagtggctgtcgtgaaaatatgccagacggcacagcaatccgccggagacatccctgaggtcggcatgctgatgaataagattcagcagcttgagcaggaagtagaaaggctgaaaacctccggtgtgaaggttcagatggaaagcgctccgaaagaagctccgcgtcctcaaaaaggcggaaaaagccattacaaagctccggtcggaagaattcatgagatattgaaggaagccacaagacctgaacttgaacagcttaaaagcagctggggcaagctgctggcacacctgaaacagcagaataaggtgtctcatgcggctctgttgaatgacagtgaaccggtggctgctgctcaaaaggcatttgtgcttaaatttaaatacgaaatccattgtaaaatggttgcagaagacaataacggagtccgtacgaatcttgaacagattctcgaatcaatgctcgggaaaagaatggatttgattggcgttccggaagcacaatggggtaaaataagagaagaatttttaaatgatcaccagcaggaaagtgaaggatcaaacgaaccggctgaagaagatccgctgattgcagaggcgaaaaaacttgtcggagcggatttaatcgaaataaaagactaataagatgaaagagagtgattgaatatgcgtggcggaatgggaaacatgcaaaaaatgatgaaacaaatgcaaaaaatgcaaaaggatatggcgaaggctcaggaggagcttgctgaaaaagtgcttgaaggcacagcgggcggcggtatggtgactgtaaaagtcaacggccaaaaagaagttgtagacattgccattaaagaagaagtcgttgatccggaagatatcgaaatgcttcaggacctggttcttgctgcgacaaacgacgccctcaaaaaagtggatgacatgacgaatgagacaatgggacaatttacaaaaggaatgaacataccgggtttattctagggggataaataaacatgcagtatcctgaaccaatatcaaagctgattgacagctttatgaaattgccagggatcggaccgaaaacagcggttcgtctggctttttttgttctaggtatgaaagaagacacagtattggattttgctaaggcgcttgtcaatgcgaagcggaatctgacatattgctcgatttgcggacatataacagatcaggacccttgttatatatgtgaggacacaagaagggataagtctgttatttgtgtcgtgcaggaccctaaggatgtgatcgcaatggagaaaatgaaggaatataacggccagtatcatgttcttcacggcgcgatttcaccaatggacggcatcggcccggaggatattaagattccggagctgctgaaacgtcttcaggatgatcaagtgacagaagtcattctcgcaaccaaccctaatattgaaggggaagcaacagcgatgtatatatcaaggctgttaaagccctcaggcatcaagctctcccgtattgcccacggtctgcccgtcggcggtgatttggaatatgctgatgaggtcactctttcaaaagctcttgaaggaagacgtgaattgtaagggaggaaaaagcaaggcatgggttttcttcgcagaaatacattaagaaaagagtttgatgagaagctgatagaacagctctttaaacaaaaagaagaatggaacagacagaagagtctggtcgagaaaagtctcgagccctccgctgaggtgttgtttgagctgaaagtcgctgaatctaagtactttttttatttgaaagaagcgaagcagcggaatttgaaaatgagcagatggaagtaagaggtctattctccgggatcttctcataagcttgtactaaacaagcgagggggaagattcatggagccttttttcattatcggtttgattgtcggtctggttgctttgctttttttatggggagtatcttcaaaaccgttaagatggattggtgtgactgcgattaagtttattgccggtgcgattctgctggtgggtgtgaacttgttcggaggcagtctcggtattcatatccctgttaacctgattacaacgggcatcagcgggattctggggattcccggcatcgcggctttgatagtcattaaacgcttcatcatttaatttatcgattattgttgacatgtagaatcaagggtggtattctaatatacgtcgctgatgacgaaacgaattctaaaaaagaaattttaaaaagttgttgacgacattgaagttgatatgttacaataattaagtcgcttcaagagcgatgaacaaagttctttgaaaactaaacaagacaaaacgtacctgttaattcaaagttttaaataaatcgcacagcaatgtgcgtagtcagtcaaactactttatcggagagtttgatcctggctcaggacgaacgctggcggcgtgcctaatacatgcaagtcgagcggacagatgggagcttgctccctgatgttagcggcggacgggtgagtaacacgtgggtaacctgcctgtaagactgggataactccgggaaaccggggctaataccggatggttgtctgaaccgcatggttcagacataaaaggtggcttcggctaccacttacagatggacccgcggcgcattagctagttggtgaggtaacggctcaccaaggcgacgatgcgtagccgacctgagagggtgatcggccacactgggactgagacacggcccagactcctacgggaggcagcagtagggaatcttccgcaatggacgaaagtctgacggagcaacgccgcgtgagtgatgaaggttttcggatcgtaaagctctgttgttagggaagaacaagtgccgttcaaatagggcggcaccttgacggtacctaaccagaaagccacggctaactacgtgccagcagccgcggtaatacgtaggtggcaagcgttgtccggaattattgggcgtaaagggctcgcaggcggtttcttaagtctgataaaagctaccccggggataacaggcttatctcccccaagagtccacatcgacggggaggtttggcacctcgatgtcggctcatcgcatcctggggctgtagkcggtcccaagggttgggctgttcgcccattaaagcggtacgcgagctgggttcagaacgtcgtgagacagttcggtccctatccgtcgcgggcgcaggaaatttgagaggagctgtccttagtacgagaggaccgggatggacgcaccgctggtgtaccagttgttctgccaagggcatcgctgggtagctatgtgcggacgggataagtgctgaaagcatctaagcatgaagcccccctcaagatgagatttcccattccgcaaggaagtaagatccctgaaagatgatcaggttgataggtctgaggtggaagtgtggcgacacatggagctgacagatactaatcgatcgaggacttaaccaatttgaatgtatgcttactgttatctagttttgagagaacactctcaatggtttggtggcgatagcgaagaggtcacacccgttcccatgccgaacacggaagttaagctcttcagcgccgatggtagtcgggggtttccccctgtgagagtaggacgccgccaagctatattatggtaaaggcagctcatcatgagctgccttttttgtttttgaataaaaacaaaacaaacaccgaaatacggaaacgcccatatactaattgcaaacttcaaaaaggtccaaattgtgtatacaatcaacagcttaagggaaggctattcatacggaggtgggcaaaatgaatgaaacgtccagccatgaagaaacatgtattgtgtgtgaaaccaaaaaaagcaggggaatccatatttatacgaaatttatatgtttagagtgtgagaagaaagtagtttccactccgacctctgatccaaattatgaatttttcgttcgtaaactgaaaagccttcatacaccgacgttatattcttaaccctgaaaagggtcttttttttgcctgaaatcagaggagtttttacactttttataaaagaactgatacgataagaagaggaacttgtttagacatggaatgtaatagataatactgataaaagtgaataaataggagtcgatcaagtatgaaaccgtttattcaatatatgaaatggacgctttgcggcagcacagtttttgtattagcggggataaccttctttacgatagggcatcagccttttttgtattcgtttttatacggggcagccagcggagccgcagccagtgcggccggactatggaatgcgaagcgtctctttttaaaaaaacaccggctgacaagaaaagaatatgcttatatcaaggaaaatcttgaggaagcaaagggtaaaatcatccgattacgcagggcgctttttcgctctaaaagtatacaaatgctgaagcagaatgcagagatactgcggataacccgacgaatatatctgctcacaaagcaggagccgaagcgtttttatcaggcagagcgtttctattatcaaacgcttgattctgttgcggaactgacggaaaagtatgctctgctctcctcacagccgcgaaaaaataaagatttatcaatgtccttgagtgagacgaggatgactctggcagagctctccagaaggctggaagaggatcttcatgaactgatgaaggaggacatcgacgacctgcactttgaattagatatggcaaagcattcactgagaaaataagaaaggaagaaggaaatggccaaagaccgttccgacgacagcatgggcgcccaaaatgaccagacccctctaaagcatgcagatacgctgccggaagaaaaaagagaggcggcacttcagctcgctgaaaaactggaccctgagaacatgcaaagcattgttctgtttggttcacaggcgcaggcgaatcttctggaattttcccatacgatgatagagcacgtgcaaagaaaagatgcaggagagatgggacaaatattggctgatctgatgatgaagcttgaccaggtaaaccctgatgatctgcagatgaagaacaaagggtttttcgcccggctgtttaaaagggtatccggttctgtgcaggaagtgctttcgaaatatcaaaagacaagtgtgcagattgaccgtatcagcagaaggctggaacattctaaaaatgtgctgttgagtgacaataaattgttagatcagctgtacgcccaaaataaacaatacttttctgatttaactatgtatatagcagcgggggaattaaaattagatgagctgaaaacaaagatgatacccgaagcggcaagaaaagccgaattacaagaacacaatcaaatggccgcgcaggaagtgaatgatcttcgccagtttgccaaccgtctggataagagggtgcatgatctgctgctgagcaggcagattacgcttcagagtgcgccgcaaatccgcctgattcaaaacacgaatcaggcactggcagagaaaattcagtcctccattgttacggctattcctttatggaagaatcaagtcgccatcgcgctgacgcttatgaggcagcggagtgcggcagatgtgcagcagaaggcggcggatacgacaaatcaattgctgctgaaaaacgctgaacttctgaaaacaagtacagtcgagaccgcgaaagccaatgagcgcggacttgttgaggcagaaaccctcaaaaaagtgcaggaaagcttagtcagcacacttgaagaaatcatgtctattcaagaagaaggcaggatgaaacgcaggcttgccgagaaggagcttgttatcatggaaggcgatttaaaaaagaagctgcttgatatgaggtccggccgggataacggctagatggcaaaaagtcttagctttaagttggctcgcaggcacgatataataagaaagacaggcaaaggatttgtttaaaaatggacacacctttatatacagcgctgatgaagcatgcgcaccgaaatacgtattcttttcatgttccgggacatcacaatggagatgtcttttttgatgaagccaaatctgtatatcaatctcttttatctattgatatgactgagatcacgggtcttgatgacttgcatcacccgacgggggtcattaaggaagcgcaggatttggtgagcagattttacggctctcaggaaagtttctttctcgtcaatggaacgaccgccggcaatctggcgatgattttagctgtttgtgaaccgggtgaacccattctgatccagcgtaattgtcacaagtctgttttccatgcggcggcattggccggagccaagccggtttatttggcgccggaaatcgatgaaaacatgcatgtgccggcacatgtatccctttcagtcatcgaaaaagcgctggcgtcatatccgaaggcgaaaggacttgttctgaccaatccgacttactacggacacgccgccgatttgaccgcggcagttaacaaagcccattcatacggcgttcctgtactggtggatgaggctcatggggctcactttgtgttaggccagcctttcccgccttcatcattggctatgggggcagacgccgttgttcaatcggctcacaaaacacttccagctatgacgatggggtcttactttcatttgaacagcaccagaattgacagagatcgattaacttattatgtaagcagtttgcaaagcagcagcccgtcatacccgattatggcatctttagatacggcgcgcgcttatgtgcaggatattgctgaaaaagggacacttcccgttcatatggagcgcattgagaaaatcaaacgaaagttcgcatcaatttcttctattgaaataatcgagccttccggatatgggctgcgggcggacccgttaaaattaattcttcggtcaaagctcggacattccggctattcattacaacggattttggagagtgaaggcattgttgccgagctggctgacgagtaccaagtattgctcgtactgccgataggcggccggcggatgatagaacaggcaaccgtaagaaacatacagcagaaactggaggatacaccgcccgataaattgccggatgccgtgaattggacatttccgtccatttcgacacttgaatatccgcaaaatgagatgcggaagtttacaaaagagcctgcagatataaataaggcggccgggcgcttgcatgcgggcaacattattccttatccgccgggaattccgctgatcatggacggagaacggataacagaagagatcgtacaaaagctttcccgtttaatcggcatggacgcgcatattcaaggcttgttaaacggggaacaattacttgtctatatagaagaggagaaatcatgagcggtttatttataacatttgaaggtcctgaaggtgcagggaaaacgactgtgcttcaggaaatgaaagagattctgtcggcagaggggctcccggtgacagcgacaagagaaccgggcggcatcgacattgcggaacagatcagagaagtgatcttaaataaaaacaatacactgatggatgcaaaaacggaggcgctgctttacgctgcggcgagaagacagcatttagtcgaaaaggtgcagcctgcattgaaagaaggccgcattgtgctgtgcgatcgtttcatcgacagttcgctggcttaccaaggctatgcgagagggctcggcattgatgaagtcctttctattaaccagtttgcaatcggcgatacgatgcctgatgtcaccatctatttttctattgagccggaagaagggttgaaacggattacgtcgaatgattcaagagagaagaatcgtctcgatcttgaggccctgcactttcacacgaaagtacgggaaggataccaaaaggtaatgcagcgttttccggaaagattccatacaatcgacgcatcgaaaaagaaggaactcgtcattcaggacgcacttcaagtgataaatgaagcattgaaaaaaattcagttgtgacctgtttctcataagttgctataatgaatgtaacgataatgttctttccaacctaaagggggcctagagaatgaaactaatagtggcagtggtgcaggatcaggacagcaacaggcttttgaaagtattaaccgaccacaacttcagggtgacgaagcttgcgacaacaggcggattccttaaatcaggcaatacgacgtttatgatcggggtggaagatatccgtgtcgataaagcgctcagcctcattaaagagaatggctgtaaacgtgatcagatgattgccccggtatccccgatgggcgggaatgcggattcctacgttccatatcccgtcgaagtggaagtcggcggagcgacggtctttgtcctcccggtcgatgaatttcatcaattttaaggatttgacgacgtgaaaataaattctgacttacgtacatttattgagaaaaagcagcagcctgcttataaagcggcagagctttccggaacatttaaaagttcaatggacagccaaagcagcaagctgaaatttgatcagctgagcaggttcttaacggatatagaaacgttcgggaaaaggctgacgaagtcgagaaacttcaaagacttagcgaaattcaaaggattggtaaaacgttttgtaaaagaggccgtagacagcggattatcgcatgagacggagaaaagctttgacctgtacggcagcagccggactctggggcttgtgaaagaaatagatgaaaaactgcttcagctgacggaagaaatgttagatcaggaaaaaccggcaattgatttgctggatcgaatcggagaaataaaaggtttattgattaacctttacacatagagagtgatacaatggcaatatcatggaaggaaatgaccgggcagcagcccagagtgatgcggcttttgcataacagcattgaaaagaaaaggctttctcacgcatatctgtttgaaggcaaaaaaggaacgggcaaattggatgccgcactgcttctcgcaaaaagctttttttgccttgaagacgggactgagccttgcggggagtgccggaactgtaagcgtattgaatccggaaaccatcccgacctgcatgtggttcagcccgacggattatccattaaaaaggctcagatccaatcgcttcaggaagagttttctaaaacaggactggaatcgcataaaaagctgtacattatatcccatgcggatcaaatgacgacaaatgcagcaaacagtctgctgaagtttttagaggagccgagtcaagacaccatcgcaattcttattactgagcagctccaccgaatactggataccatcgtttcgagatgtcaggttcttccgttccagccgcttcagccgaaagccatagaagaaagactgattgaacaggaagtgagccctcacatggcccggctcttagcaaatatgacaaataatattgcggaagcagtcgaattaagtcgaaatgatgagtttgcagagtccagagcgaaagtgataaaattgtatgaagtcttacatcagcggaaaggacatgcctttttcttcattcaggatcagtgggtgccctttttcaaagaaaaaacccatcaagaaatgggtcttgatatgctcttattgatataccgtgatgtattatccatccaaattggaaatgaagataaactgatttatcaagacttattccaatcaataaaacagcatgcgctgcaatttacacaacaaagcgttacgaaccaaattctcgctgttttagaagcaaaaaaacggcttcattccaatgtgaatgtgcagggattaatggagcacttggtgttaacgttgcaggagggataagcttgtacaacgtaataggcgtccgctttaaaaaagcggggaaaatttattattttgatccgaacggatttgatatagaacaagacagctgcgtcattgttgaaaccgtaagaggtgtcgaatacgggcaggttgtcatcgcaaataaacaagtggacgagcatgatgttgtgcttccgcttcgaaaggtcatacgcgttgctgatgaacgcgatcttctcattgtagaagaaaacaaacaggaggccctgtccgcttttgaagtctgtcagaaaaaagtggctgaccacggcttagatatgaagctggttgatgttgagtttacatttgaccgcaataaagtcattttttactttacagcagacggacgggttgatttcagggaattggtcaaagacttggcttctatctttaaaacgagaatcgaattgcgccaaatcggggtgagggacgaggcgaaaatgctcggcggtatcggaccatgcggaagaatgctttgctgctccacgttcctcggtgattttgaaccggtgtccatcaaaatggcgaaggatcaaaatttatcgttgaacccaacgaagatttccggtctgtgcggccgtttgatgtgctgtttgaagtacgaaaatgatgagtatgagacggcaaaagaacagctgccggatttaggcgaaatgattacgacggcaaacggccccgcaaaggttgtcggtcttaatattctggaacgggtgcttcaggtggaactgaagaatcgtgaaaaagtgatagaatatacttgggaagagctcttggaagagggcgtcgtatccgcacaaaccacagattaacgaggtgtggaaccttggataaaaaagagttatttgatactgtcataaacctggaggaacaaatcggttcgctgtaccgtcagctgggtgacttaaagcagcatatcggcgaaatgattgaagagaatcaccatcttcagcttgaaaataagcatttgcgtaagcggcttgatgacacgacagagcaaattgaaaaattcaaagccgatcagaaagaaacaaaaacacagaaggcagagcagagtgatataggagaagggtacgacaatctggcccggctgtatcaagaaggctttcatatttgcaacgtccattatgggagcgtccgcaagggagattgccttttttgtctgtccttcttaaataaaaaataaggaaaaggcttccgctgatgtcggaagcctttttcaaagagtgccgaaaggaataagattatggtttcattacgtgatgatgaaagattggattacttattagcagaggatatgaaaatagtacagagtccgacggttttcgctttttcattagatgccgtgctgctgtctaagtttgcatacgttccgattcaaaagggaaacatcgttgatttatgcacggggaacggcattgtgccgcttttgctcagcacaaggtcaaaagccgatatcaccggggttgaaattcaggaacgcttgtatgatatggcgctccgaagcgtggaatacaacgggctgggcggtcagatcagtctcattcatgatgatctgaaaaatatgccggaaagactcggacataataaatatgatgttgtcacctgcaatccgccttattttaaaacaccgaaagaggcggagcagaacctgaacgagcatctcagaatcgcaaggcacgaaatcctttgcacgcttgaagatgtgatttccgtcagcagcaaactgctgaagcaaggcggaaaagcggctatcgttcatcggccggggaggcttttggaaatctttgaattaatgaaagcgtaccgaatagaaccgaaacgggttcagtttatttatccgaaacaaggtaaagaagcgaataccattttggttgaaggaattaaaggcggccgccctgatctcaaaattcttcccccgctgttcgtatacaatgaacaaaatgaatatacgaaagagatccgcacgattttatatggagacaaatagtcatttcttttatgtgctgctgtgcaatgacaacagtctgtatgccggttatacaaatgatctgcaaaaacggctgaaaacccacaatgagggaaagggcgcgaagtacacaagggcgagaaggccggtttcgttatgtcatgcggaatcatttgaaacaaaacgggaagcgatgcaggcggaataccgttttaagcagctgacccgaaagaaaaaagagcaatatatagaagaaaaacgacgcagcaaggaggctgtatatgttaagacgccagatgagttttaatggaaaatcagaaatgggaactctgtaccttgttcctacaccgatcggcaatttggaggacatgacctttcgtgcagtagagacgctgaaatcggccgatgtcatagctgccgaagatacgagacagacgaaaaagctgtgccatgtttatgatatagaaacatctctcatcagctatcatgaacataataaagaaagcagcggccataaaatcattgaatggctgaaaagcggaaagaatgtggcattggtcagtgatgccggcatgccgacaatttccgacccgggggctgagattgtgagagatttcacccaaatcggcggatatgtcgttccgcttccgggtgcaaatgcggcattaaccgcgctgaccgcatcaggcatcaccccgcagccatttttcttctacggatttttaaacagacagaaaaaagaaaagaagaaagaactcgaaatcctgaaaaaacggcaggaaacgatgatattttacgaagcgccgcacagattaaaagaaacattaacagcaatgcatgacgttttgggtaatcgaaccatcgccgtcacgagagaattaacgaaaaagtacgaggaattcatcagaggaaccatcgccgaggtgatggaatgggcaaatgaagatcaaatccgcggtgagttctgtctcgttgtcgaaggaaatcaaaccgctgaaccggaggaagaggaaaagccttggtggacggagctttctgagaacgagcatgtggagcattacataaacgaaggagcatcttccaaacaggccataaaacaaacagcggtagatcggggcgttccgaaacgcgagatttatgacgcttatcacattcaatcataaaaaaaaccgttcttgtatcgtaacaagaacggtttttgtatgaaatagcttatttttggttttgaagctggttttgaatttcagagataatttgctcagcgccttctttgctgagtaccaatttgccgccggcaagtttaaggttatcatcagaaacttcaccagttacttggcaagtcatgtttggtttatattttttaaggatgattttttcatcatcaacataaatttcaagagcgtctttttctgcgatgcccagtgtacggcgaagttcgatagggataacgacgcgtccaagttcatcaactttacgtacgataccagtagatttcattaacagtctcctcccgagagataattattttgtagtttatatttttcttcgtcattattcgacaaaattccttacattcctagcataacaaggtttccaataatcgtcaatctttttgtttactattgattgtaagaattagttcttatagtaagtaaagccttggaaatcctgaaataacaggctttttgactgctttttcgaacctattatcctactgaaaatccttttaaatcaagactttcgaaccaagatgttttatattagtagattatatacgacaaatttcgacatgttaagactttttttaatttcaataaaaatttttaattttatttactcttttacgcgcagtacgtatatatccttgatcttaaaggctaagatggtatcatagatagaggacaaatatcaatattgtatatcaaataaaaccgctctcgtcctttgggcgtgagcttttcgacattctgaatgggaggttgcaacatgccgcaagacaataatactttttatattacgaccccgatatattatccgagcggaaaattacatatcggccatgcttatactaccgtggccggcgatgcgatggcgcgttacaaaagattaaaaggatttgacgtacgctacttaaccggaacggatgagcacggacagaaaatccagcagaaagcggaggaagagaatatcacgcctcaagcttatgtagatcgtgcagttgctgaaatccaaaaactatggaagcagctcgacatttctcacgatgatttcatccggacgacggaaagccggcacaaagaaattatcgagaaagtgtttcaaaaacttcttgataatggtgacatttacctggatgagtatgagggctggtacagcatccctgatgaaacattctatacggaaacacagctggtggatgtggaaagaaatgagaagggtgaggttgtcggcggaaaaagcccggacagcggccatccggtcgaattaatcaaagaggagtcatacttcttccgcatgagcaaatacgcagaccgcctgctgaagttttatgaggaaaatccttctttcatccagcctgaatcacgcaaaaatgaaatgattaacaacttcattaaacctgggcttgaagatttggccgtttccagaacgacgttcgactggggcgtaaaagtgccgggaaatccgaagcatgtcgtgtatgtatggattgacgcactgttcaactatattacagcgctcggttacgatacggaaaatgatgagctttacaaaaagtactggccggctgacgtccaccttgtcggtaaagaaattgtccgttttcataccatttactggccgattatgctgatggcgcttgatctcccgctgcctaagcaagtcttcgcgcatggctggttattgatgaaagacggaaaaatgtcgaaatcaaaaggaaatgtcgttgatccggtaacgttaattgaacgttacggcttggatgaacttcgctattacctgcttcgcgaagtaccgttcggttcagacggtgtctttacgccggaaggtttcgtagaacggattaattatgacttggcgaacgacttaggaaaccttctgaatcgtacagtcgcgatgatccaaaaatattttgacggtgagattggttcatatgaaggaaatgtgaccgattttgattcagagctttcttctgtagccggtgaaacggttaaagcttatgaaaaggcaatggaaaacatggagttttcagtcgctttatcaacgctatggcaattaatcagccgtacgaacaaatatattgatgaaactgctccgtgggtgcttgctaaagaccaggaaaaagaaaaagaattacgttctgtcatgtatcatttagctgaatctttacgtatctcagccgtattgctccagcctttcttgacacaaacgcctgaaaaaatgtttgcccagctcggagttgaggatcagtctcttaaagcatgggacagcattcagacattcggccaattgaagaacgcgaaagtgaaaaaaggggaaccgcttttccctcgtcttgaagctgaagaggaagtagcttacatcaagcaaaaaatgcaaggaactgctcctgctaaagaagaaaaggcggaagagccgcaagaagcagagcgtcttcctgaaattacgtttgatcaatttatggatacagaacttcgcgtcgcagaagtcttgtccgcagagccggtgaaaaaagcagatcggctgctgaaattgcaaattgatctgggctttgaacagcgccaagttgtatcaggtatcgcgaagcattacacaccggatcagcttgtgggaatgaagatcatttgtgtaacgaatctaaaaccggtaaaactgagaggcgagctttctcaaggaatgatactggcaggagaatcggacggcgtactaaaagttgtagctatcgaccagtcattaccgaaaggcactcgaattaaataatagatgcaaaaggtgtttcacgtgtaacattccgtcgaacaccttttgtttttcaacaagaaaggagtttttatgatgctttttgatacacatgcgcacttaaatgccgagcaatttgacacagacttagaggaagtcattgcgcgtgcaaaggctgaagaagttgaacgaatcgtcgttgtcggcttcgacaaacccactatcacgcgtgcgatggagctgattgaggaatatgactttatatacgctgcgatcggctggcatccggtagacgcaattgacatgacagaggaagatttatcatggattaaggaactgtcctctcacgaaaaagtcgtggcaatcggagagatgggccttgattatcactgggataaatcaccaaaagacgttcagaaagaagtattccggaaacaaatcgctctcgccaaagaagtgaaccttccaattatcattcataatcgtgatgcaacggaagatgttgtcacgattttgaaagaagagggggcggaagaagtcggcggtattatgcactgctttacagggagcgcggaggttgcgcggcagtgtatggatatgaatttttatatttcattcggcggaccggttaccttcaaaaatgcgaagaaaccaaaagaagtagcaaaggaaattccgaatgaccgtttgctgattgaaacggactgtcctttcctgacaccgcatcctttccgcggtaaacgaaatgagccaagctacgtaaaatatgttgctgaacagctcgctgaattaaaagggctgacatatgaagaaattgcctcaattacaaccgaaaacgcaaaaagacttttccgcataaactgacagaatgcgctgtcgtaacgtgtaaaggcttgtccgattcagtggatatgtaaaacggttctacaagcttccttctcctcataagataggttgtcgatatgtctctcttcctttttttgctttgtttttgcataatgagggatacgctgaaggtttttcatcttcgagatgggagggttgacagcattttagatactctatataatctctccgaggagaaggaggcgtttttcatcacacaaaaaatgaaaaaactgttttccgtaaagcttggtaaaagcaaggttattcttattgcagctattattctgctgggcggaaccgggactgcatacggggcacatgagctctcaaaacaatcagtttctgtttctatcaacggcaagaaaaagcaaatacgcactcatgcaaaaacggttggggaacttctggaagatttacatatagagacgagaaatgaagaccggattaccccgtctaagcagacagcattggcagacaacatgaatgtcgtgtatgaagctgcaaagcagatccgtgtgacaagaggcggagaagaaaagactttatggtcaacggcaaaaacagtcggcgcatttctgaatgaacagcatacacctgtgaatcagcacgataaaatagatccagcagcagatacgaaagtgacaaacggcatgaaagtcacggtcgacccggcttttcaggtcactgtaaatgatgcgggaaagaaaaagaaaatatggacgacttcgactacggtcgctgactttttaacgcagcataagatggacatgaaagacgaagataaagtaaaaccggcattacacgaaaagctcacaaaaaatcaggccggcatacaaatcactcgtatcgaaaaagtcaccgatgtagttgaggaaaaaatagcgtatcaagtgaaagaaaaagaagatgcgtctctcgacagcgggaaagaaaagatcgttcaaaaaggaaaagaaggcaaacttaaaaagcattttcatgttgtcaaagaaaatggaaaagaagtttcaagaaagcttgttaaagaagaaacatctgaaaaaagcaaagatcaaatcattgcggtcggcacaaagcggcacagtcccaagattgagcagctcagtgcacctgtgaaggcatcttctggcgaaaccggatcttccggtaaagtgattaccgtgtcttccacggcttataccgcaagctgcagcggctgttccggccatacggctacaggcgttaacctgacaagcaatccgaatgctaaagtcattgcggtagacccaagcgtcattccgctcggcacaagagtccacgtagacggatacggggatgccgtggccgctgatacaggctcagccattaaaggaagacggattgatgtctttttccctgaaaaatcttcagcttaccgctggggaaagaaacaggtcaaaataaaaatcttaaattaattccgattcactcagagggttttgcgccctctgtttttttcgttataataggtaaagtgtattttcagtatattagacgtgacatgtaagcaaaggtttcgttttggatataaaaagtttttttggaggaagtaatgaaaattaaagaaattattgtagtcgagggacgcgatgacactgcgcgcataaaacttgccgttgatgcggatacgatcgagacaaacggttccgcaatcggagacgaagtcatcagacagattcggctggcgcaggaaacgagaggggtcatcgtgctgacggacccggattttccgggggaaaagatccggaaaaccatttctgaagcagtacccggctgtaaacacgcatttctgcccaaacatcttgccaaaccgaaaaacaagcgcggcattggcgttgagcacgcatccattgaaagcatcagagcatgtctggaaaatgtgcatgaagagatggaggcaaagccgagtgagatttcagctgaagatgtcatacaggccggtctgatcggcggaccggctgccaaaagacgccgcgaacgattgggcgacctgctgaagatcggctatacaaacggcaagcagcttcaaaaacggctgcaaatgtttcaaatcaaaagaagtgattttattgatgcgctcgatgctatgaggcaggaggaacaggatgaacaataaagatatcgcgacacctatcagaacgaaggaaattctgaaaaagtacggtttctcttttaaaaagagtctgggacagaatttcttaattgatacaaatatattggacagaattgtggaccatgcggaaattacggatcggaccggagtcattgaaatcgggcccggaatcggcgcgctgacagagcagcttgccaaacgggcgaaaaaggtcgtcgcgtttgaaattgatcagcgcctgctgcccattctcaatgatacgctgtctccatatgacaatgtaacgatcattcatcaagatgtgctgaaagcagacgttaaatctgtcattgaagagcattttcaggattgtgatgaaattatggtgacggcgaatctcccatattatgtgacgacgccgatcatcatgaagctcttggaagaacatcttccgttaaaagggattgtcgtgatgctgcaaaaagaggtcgctgagcggatggccgctgatccttcctctaaggagtacggatcgctttccattgcggttcagttctatacggaggccaaaaccgtcatgaccgtcccgaaaacggtgtttgtgcctcagcctaatgtcgattccgcggttatccggcttttactgcgtgacggcccggcggttgacgtcgataatgaaccgtttttcttccagctgattaaagcaagcttcgcacagcgccggaaaaccttgctgaacaaccttgtgaacaatcttccgggcggaaaagaaaaaaaagctcaaattgaagaagttcttcaagaaacgaatattgacggaaagcggcgcggtgaatccctgtccatagaagaattcgcgctcctgtccaacggattgcataaagcccttttctaagagggctttttgttttgcgtcaccacttggactgccgctacataggctagaggagaaccttattcattcaactgcaagaaaagcttgaaacatcaagcgccgcagcggaaagaggtgtatttgccaagacttctttcatgatgaggcttagtctatttgtggagtgggtaacgtgcaatttcaaataggagatatggtagccaggaaatcctatcaaatggatgttttatttcgcattatcggtatagagcaaacaagcaacggaaattcaattgccatcctgcatggtgacgaagtcagattgattgcggatgctgatttttctgatttggagcctgtcagaaaagacgaacaggccatgagaaagaaaagagatgaaagcaggatgaatgaatctctcgagctgctccgccaggattataagctgcttcgggaaaaacaggaatattatgcgacaaatcaatatcagcatcaggagcactactttcatatgcccggaaaggtattgcatctggacggcgatgaggcctatttgaaaaagtgcctgaacttttatgaaaaaatcggtgtgccggtatacggaattcattgccatgagaaaaaaatgccggcatcaattgacgagctgcttgataaatacaggccggatattttagtcatcaccggccatgatgcatattccaagcataagggaggcgtgaacgatttaagcgcctacaggcattccaaacactttgtcgaaaccgttcaaaaagcgaggcgtaaagtccctcatttggatcagctggttatattcgcgggggcctgtcaatctcatttcgagtctttaatcagagcaggcgcgaatttcgcaagttctccgtcacgcgtcaatatccacgcgcttgacccggtatatattgtcgcgaaaatcagcttcaccccgtttatggagcggatcaatgtatgggatgtcctgagaaatacgctgacgagagagaaagggctgggaggaattgaaacgaagggtgtgctgcgtgtcggtatgccgtataaatcaaatggatgagtgataaaacccgcatatatttcgctatgcgggttaattattttacaaattgatacataaatttccggaacttgtgaaaaataacgcagaaatcaatagaattttgtcaaaataattttgttgacaatgacttattaacgttgatataatttaaattttatttgacaaaattgggctcttgttgtacaataaatgtagtgaggtggatgcaatggcgaagacgttgtccgatataaaaagatcgcttgatgggaatttaggtaaacggcttacgttaaaagcaaacggcggccgccgaaaaacgattgagcgttcgggcattttagctgagacgtacccttctgtttttgtgatacaactagatcaagacgagaattcgtttgaaagagtttcatacagttatgctgatattctgactgagactgttgaattgacattcaatgacgatgcggcaagctcagtagcattttaatgggcagtgaaccttttgtttactgctttttgttttgccttctaaagctcttctaattattccctcgaaagtttcagccgattaaacggaagctataagtgtcacatgttttatcgtggcgtgcacgaatggtgatcaattctataaaaggggttgtttcgtttgggcagacgtcgtggagttatgtcagatgagttcaaatatgagctggcgaaggaccttggtttttacgatacggtgaaaaacgagggctggggaggcattcgggcgcgtgacgccgggaatatggtaaaacgcgcgattgagattgccgaacagcagatggcggctcagaaccaaaataaccgataatgcagtggcccgggggacaatccgttccccggttttttctatcggctgtcaaaaccggcgtcaatttcggataagtacctccgggtctccaaatgtgatacaatgttcatacttatgtttagatggagaagtaggtgaaagctatgcgtattttagaaaaagcgccggccaaaatcaatctgtccctcgatgtgacgagtaaacgcccggatggttatcacgaagtggagatgatcatgacgacaattgatttggcagatcggattgaactgacagaactgcccgaaaacgttatcagagtggcgtcgcataatcgctttgttccggatgatcaaaggaatctggcttatcaggcagccaaactgcttaaagaacgatttcaagtcaaaaaaggcgtttccattatgattacaaaagtgatccctgtagcggcagggcttgccggcggaagcagcgatgcggcagccacgctcagagggctgaacaggctttgggatttaaagctttctgtcgaagagctcgcggagcttggagctgaaatcggttcagacgtgtccttctgtgtatacggaggcactgccctggcaaccggacgcggtgagaagatcaggcacatcagtgctccgcctcattgctgggtcgtgcttgccaaaccgacgatcggggtatcgactgccgaagtgtaccgccggctgaacttacagcaggttcggcatcctgatgtgcaggcgatgattgacgcgattgaagaaaaaagcttccaaaaggtatgcggacaattaggaaacgtattggagtcggttacgctcagcctccatcccgaggtggcgatgattaaaaatcaaatgaaacgcttcggcgctgatgcggtgttaatgagcggaagcggaccgactgtattcggtttggttcaatacgaatcgaaggtgcagcggatttataacgggttaagaggtttctgtgatcaagtgtacgcggtgcggatgatcggcgaacagaatgctcttgattaaatccgtatgttaagttatattatttttaaattattcggattttgggggtaagttcatgaagtttcgtcgcagcggcagattggtggacttaacaaattatttgttaacccatccgcatgaattaataccgttaacgtttttctcagaacggtatcaatcagcaaagtcatcaatcagtgaagatttaacgattattaaacagacctttgaacagcaaggcattgggacgctgcttacagtgccgggagctgccggaggcgtcaaatacattccgaaagtgaaacaggctgaagcagaagcgtttatacaggagctgggacagtctttagtaaatcctgagcgtatccttccgggcggttatgtatatttaacggatatcttaggaaaaccatctgtcctctctcatgtaggcaggctttttgcttccgtttttgcggagcgggagattgatgtggtgatgaccgttgcgacaaaaggaatccctcttgcttacgcagcggccagttatctgaacgttccggttgtcatcgtgcgaaaagacaataaagtgacggaaggctccacggtgagcatcaattatgtatcagggtcgtctaaccgcattcaaacgatgtcgcttgcgaaaagaagtttggctacgggttcgaacgttttgattattgacgattttatgaaagccggcggcaccattaacggcatgatcagcctgcttgatgagtttaatgcaaacgttgcgggaataggcgtcttggttgaagccgagggagtgaatgaacggcttgtcgatgaatacatgtcactgctcacgctttcaaccatcaatatgaaagacaaaacgattgagattcaaaacggcaattttctgcgattttttaaagaacagcatttaaagaatggggagacagaaaaatgacaaaagcaatccatacaaaacacgcgccggcagcgatcgggccatattcacagggaatcatcgtaaacaacatgttttacagctcaggccagattcctcttactgctgaaggagaaatggtaaacggtgatatcacagagcaaacgcatcaggtgttcagcaatttaaaagctgtgctgaaagaagcgggcgcttctctcgagacggttgtcaaagcaacggtgtttattgctgatatggagcagtttgcggaagtgaatgaagtgtacggacaatactttgatgtacataagccggcaaggtcttgtgtggaagtggcgagactgccgaaagacgctctcgtggaaattgaagtcattgcgctggtgaaatcttaaatctcagaaaagtggttccggtctccgggatcactttttttatgcagtatatgatccccaaatatggtttatcacctaattgtgtatgtatatcctatattttcaaaaaaactttttgaaacgtgcaggaatttaaaaagaatcgtggaattgttagactaatgcttttatatagggaaaaggtggtgaactactgtggaagttactgacgtaagattacgccgcgtgaataccgatggtcgcatgagagcgattgcatccatcacgctggatcacgaatttgtcgtacatgatattcgtgtgattgatggaaacaatggtcttttcgttgcgatgccgagtaaacgcacccctgatggagaattccgcgatattgctcatcctattaattccagcacgcggggcaagatccaggatgctgttttaaatgagtatcatcgtttgggtgattctgaagcattagaatatgaagaagccggggcttcttaaacataacaaaatgtaaggactgctgataaaggctgacacaaggccttttccggcagtccttttttaaatctgatttttcagtaataaagcgattacatagaaaattcttgcactttttgatgtcttcttgaaatcaacagctatttaggatatatttttctatggataaaagggatattggaggccattaaatggataagcggtttgcagtgattttagctgccggaaaaggaacgagaatgaaatcgaagctttacaaggtccttcatccggtatgcggaaagcctatggtagagcacgtcgcagacgaagctctgaaattatctttagcgaagcttgtcaccatcgtaggacacggcgccgaagatgtgaagaagcagctcggacagaaaagcgattacgctctccaagcagaacagctcggtacggctcatgcggtcaaacaggcaaaaccatttcttcacggagaaaagggtgtcacgatcgttatttgcggcgatacaccgcttctgacggcggagacgatggaagccatgctgaatgaacatacagacaaaggtgcaaaagccacggtgttaacggccgttgccgacgatcccgccggatacggaagaatcatccgcagtgaagacggcgccgttcaaaaaatcgtggagcacaaggatgcttcggagcaagaacgtcttgtgaaagaaatcaacacgggaacgtactgttttgataacgaggctctttttcgtgtcatcgaacaggtttcgaatgaaaatgcccaaggcgagtattatctgccggatgtgatcgaaatcctcaaagacgaaggcgaaactgttgccgcttaccagactggtaacttccaagagacgctcggagtgaatgatagagtcgctctttctcaggctgaaatgtatatgaaagagcgtattaacaaacggcatatgcagaacggagtcactttaatcgatccgatgaatacgtacatctcacctgacgcacgtatcggacaagatacagttatttatcccggaactgtgttaaagggacaagctgaaatcggcgatgaatgtgtcatcggcccccacactgagatagaggacagctcaatcggcagccgtactgtgattaaacaatccgttgtcaatcgcagcaaagttgggaatgatgtaaatatcggtccttttgctcacatcagacccgattccgcaatcggcaatgaagtgaagatcggaaactttgttgaaatcaagaaaacacaattcggcgaccgaagcaaagcatctcatttaagctatatcggtgatgccgaagtgggcacggatgtgaatctgggttgcggctccatcacggtcaattatgatgggaagaaaaagtatttaaccaaaattgaagacggcgcctttattggctgcaactccaatctggtcgctcctgttacagtgggagaaggcgcgtacgtcgctgcgggttcaaccgtaactgaagatgtgccgggcgaagcgcttgccattgccagagcaagacaagtaaataaagaagattatgtgaaaaacattcataaaaaataatcctaaaatcggaggtttaccatgtctaacgaatacggagataagaatttaaagattttttctttgaattcaaatccagaacttgcaaaagaaatcgcggataatgtaggggttcaattaggaaagtgctctgttacaagattcagtgacggagaggtccagatcaacatagaagaaagtattcgcggctgtgattgctatatcattcagtctacaagtgcgccggtcaacgagcacatcatggaattgctgattatggttgacgctttaaagcgcgcttccgcgaaaacaatcaacattgtcattccgtactacggttatgcgcgccaggacagaaaagcaagatcgcgtgaaccgattacggcaaaactttttgcaaacctgcttgaaacagcgggtgcgacacgcgtgatcgcgcttgatttacacgcgccgcaaattcaaggtttctttgatattccgattgaccacttaatgggtgttccgattttaggccattactttgaaggtaaagacttgaaagatatcgttattgtttctcctgaccacggcggtgtgacgcgcgcccgcaaacttgcggaccgtctgaaagcgccgatcgcgattatcgacaaacgccgtcctagaccgaatgaggtagaagtgatgaacatcgtcggtaacgtggaaggtaaaacagcgattctgatcgatgatattattgatacggccggcacaatcacacttgccgctaacgcgctggttgaaaacggagctgcagaagtgtatgcatgctgtacgcaccctgtactgtcaggtcctgccgttgagcggatcaataactctaaaatcaaggagcttgtcgtaacgaacagcattaagcttcctgatgagaaaaaaatcgaacgctttaagcagctttctgtcggaccgcttctggctgaagcgattatccgcgttcacgagaaacaatctgtcagctatttattcagctaaaccgaaattttaaggtttaaatcccagttattgtgggtattgttctaataggacgataaaacgataattaggatggtgctgaatatggcaactttaaaagcaaatgaaagaacagattttaaacgttcgacgcttcggaaaatccgtcattcaggacatgttccagggattatatacggtaaagaaataacgaatacgcctgtctctttagacagtgtcgaattgcttaaaacattgcgggacgaaggaaaaaacacgattatcacaattgatgtcaacggaaatcagcaatcggttatggtgactgatcttcagacagacccgctcaaaaacgaattgacgcacgccgattttcaagtcgtgaatatgagtgaggagctggaggccgaggtgccgattcagctgacgggagaggcgaagggagtcaaagacggaggcgtcatccagcagccgctgcatgagctttcgattaaggctaagccgaaggacatccctcagacaatcaatgttgatatttccgggcttgaaatgaatgatgtgctgaccatcgcagatctgactgctgacggcaattatacatttacaaacgacccggaagaagtcgtggcttccatccttcctcctaagcaggaagcattcgaagaagatgcagaaccgtctcctggggaagagcccgaaggagaaaatcaataagcgctttaagacgtaacccgcccgaggttacgtcttttgtgctagaatgagaagaattacagcgatgttgagggaggatttacgatgcttgtgattgccggtctgggtaacccgggaaaaacctacgagaacacgagacataatgtcggctttatggccattgacgagctttctaaagaatggaatattgaattgaataaaacgaaattcaacggactttacggaatggggtttgtttccggaaaaaaagttctacttgttaaaccgcttacatatatgaatttatcaggggaatgtttgcggccgctactggattattatgatgccgatcatgaagatctgaaagtcatatacgatgaccttgatcttccgacggggaaaatcaggctccggacgaaggggagcgcaggcggacataacggaattaaatcgcttatacagcacctcggaacccctgaatttgaccgggtcagaatcggaatcggccgccccgtcaacggaatgaaagtcgttgactatgtactgggagcttttacgaaggaagaagcgccgcatatcaatgatgccgtctcaaaaaccgtaaaagcctgcgaagcttccttaacgaaaccatttttagaagtcatgaacgaatttaatgcaaatgtataagataaataatgggagaccatactagggaaaaatgattttttcacatcaggaggtccaacgtatggctttgcattatttctgccgccactgcggccttaaggtagggagcctggaatattcgacggtgccgacacagtcacttggatttcagcacttaacaaatgaggaaagaaacgatatgatttcatataaagacaatggagatgtccatgttcttacaatttgtgaagactgccaagaggcgctggagcgcaatccgcactaccatgaacacaacacatttattcaataagaagctttggtgtagattctagaccaaagcgtttttctgttcttgcagaaaatagagaggagggcccatatggacaacattcaaacctttattaaagaaagcgatgattttaaatccattgtcaacggtttacatgaggggctgaaggaacagctgcttgcgggtctgtcaggttccgcgcgttctgtttttacctccgcccttgcacaggaaacgaaaaggccgattttctttatcacccataatttatatcaggcccaaaaagtgacggaagatctgacggcgcttctcggggatcaatctgtttttttataccccgtgaatgaattgatttcttcagaaattgcggtagcgagccctgaactgcgcgctcagcggcttgatgtcattaatagattaacaaacggagaagcgccggtcgttgtggcgcccgttgcggcagtgagaagaatgcttccgccgaaggagctgtggaaaagcagccagctcgtcatttcactcggagacgaaatagaaccggatcagctgtccgcgcgccttgtagaggtggggtatgagcgttccgatatggtttctgcacccggtgaattcagtattcgcggcggaattatcgacatttatccgctgacgtcggagcatccggtgcgaattgaactgtttgatacggaggtcgattccatcagaagcttcaattctgatgaccagagatcaattgagacgctcaaacatgtggcgatcggaccggcgaaggaattgatcatcagggcggaagaaaaagcccgggcgatggaaaggctcgataaagggcttgccgacagtctgaaaaagctgaagcaggacaaacaaaaggaaatgcttcatatcaatatctcacatgataaagaacggttatcaacgggacagactgatcaggaacttgtgaagtatctctcgtacttttacgaaaaacctgctagtttgctagattatacaccggcagacacgttgttactgttagacgaggtcagccgcattcatgaaatggaggatcagctgcaaaaagaagaggccgaatttatgacaagtctgctcgaggaagggaaaattctgcatgatattcatttatccttcagctttcaggagcttatgagcgaaaagcggcgcccggctatttattattcattatttttgcgtcatgtccagcatacaagccctcagaatatcgtgaatgtgacaagccggcagatgcagagttttcacgggcagatgaatgtgctcgcaggtgaaatggagcgctttaagaaatcaaacttcaccgttgtctttttaggcgcaaataaggacagaaccgacagattggcatccgtgctggctgattacgaaattgaagccgcaaaaacggacagctccaaagcgcttgtgcaaggacaggtctatgtcatggaaggcgagctgcaatccggttttgaactgccgctgatgaagctggccgtcattacggaggaagagctgttcaaaaaccgaatcaagaaaaagccgagaaagcagaagctgacaaatgccgaacggatcaaaagctattccgagcttcaggtcggtgactatgtcgtccacgtcaaccacgggatcggtaagtatttggggatcgaaacactagaaatcaaaggcattcataaagattacctcaacattcattatcagggcagcgataagctgtacgtccctgtagaacaaatcgaccaggtgcagaagtacgtcggctctgaaggaaaagaaccgaagctttataaactgggcggcagtgaatggaaacgggtgaagaaaaaagttgaaaactccgttcaggatattgccgatgatctgattaagctttatgcggaacgggaagcaagcaagggctatgcgttctcgcccgatcatgaaatgcagcgacagttcgaatctgctttcccttatcaggaaacagaggaccagctccgttccattcaggagattaaaaaggacatggaaagagagcgcccgatggaccgtttgctttgcggtgatgtgggttacgggaagacggaggtagccatccgagcggcctttaaagcgatcgcagacggaaagcaggtcgcgcttcttgtgccgacgacaatactcgcgcagcagcattatgaaaccattatggagcgtttccaggactatccgattaacatcggtcttctcagccgattcagaacgagaaaagaatccaatgaaacgattaaaggcctgaagaacggaacggtagacatcgtaatcggaacccacaggctcttatctaaagacgtcgtctataaagatctcggcttgctcatcattgatgaagagcagcgcttcggcgtaacgcataaggaaaaaatcaaacagatcaaagccaatgtcgatgtgctgactcttacagcgacgccgataccgcgtacgcttcatatgtccatgctcggtgtgcgggacttatctgttattgaaacgccgccggaaaaccgtttccctgttcagacatatgtcgtggaatacaacggcgcgcttgtgcgggaagccatcgaaagagaactggcgcgcggaggacaggtatatttcttgtacaaccgcgtggatgacatcgagcggaaggctgatgaaatttccatgcttgttcccgatgcgaaagtggcatatgcccacggaaaaatgactgaaaatgaattggaaagcgtcatgctcaattttctggaaggggaatcagacgtccttgtcagcacgaccattattgagacaggcgtagatataccaaatgtcaacaccttgattgtgttcgacggagacaaaatggggctgtctcagctgtatcagctgagaggacgggtcggccgttccaaccgcgtcgcttatgcgtattttacgtaccgcagagacaaagtgctcactgaggtggcggaaaaacggctgcaggcgattaaagaatttaccgagctgggatcaggctttaaaatcgccatgcgtgacttgacgatcaggggagcggggaaccttctcggcgcccagcagcacggctttatcgactcagtcggttttgacctgtactcgcaaatgctcaaggaagcgattgaagagcggaaaggcgatattccgaaaagcgaacagtttgagacagaaatcgatatcgagcttgacgcgtatattcctgaaaactatatacaagacggcaagcaaaaaatcgacatgtacaaacggttcaggtcaatcgccacaattgaggagaaaaatgagcttcaagatgaaatcatcgacaggttcggcagctaccctaaagaagttgaatggctgtttacggttgctgagatgaaggtatacggaaaatatgaacgcgtcgaactcatcaagcaggataaagacgcgatcagatttaccatttctgaagaggccagcgcacagattgacggtcagaaattgttcgaactcggcaataaatacggccggcagatcggactgggaatggaagggaaaaagctgaaaatctcagtacagacgaaaggccgcaaaacggaagagtggctggagaccgtgctcggcatgctgaaaggccttcaggatgtgaagaaagaaacaatcgcgtcttcataaaaattgttactctctggtgtatattacatttgatgtgacggatactaatttcaagcgagtggcggaagctacataaagtaaagagctttagtactttcccttaaatatcatcacatgaaagagaggcaccagagagatgaaagctacaggtatcgtacgtcgtattgatgatctaggacgggtcgtcattcctaaagaaattcggagaacactgcgaatcagggaaggagacccgcttgaaatattcgttgaccgcgacggagaagttatattgaaaaagtattctcctatcagtgagcttggcgattttgcgaaggaatatgcagatgctttgtatgacagtctcggccattccgtcttgatttgcgaccgtgacgcgtatattgccgtttcaggcagttcgaaaaaagaatttctgaacaaagccatcagcgatttgctcgaaaaaacgatggatcagcgcagctcagtggtagaaaacgacgtgaagtccgcgcagcttgttaatgacattgatgaagatatgagctcctatacaatagctccgatcgtggcaaatggcgatcctatcggtgccgtggtcatcttttccaaggaacaggcacttggagaagtagaacataaagcggtagaaacggcagccagttttttggcgagacaaatggagcagtaggtcttattaccattattgaaataagaaaacggagaaagagcagctcttatacaagtgctgttctttttcatattcatatgtgctctctatcggttcggccgttaggattgtgatataataagctcgttttatagacgtaattttctagcggctggaaggagcttttggatgaacgattcagttggcgccaagcggcaatcggcatggaaaggtgcttttgtgctcgtcgttgcgggtatcgtgacgaagatattaagcgccgtgtacagggttccttttcagaatattgtcggtgacgtcggattttacatttatcagcaggtgtatccgtttttagggatcgcggtcatgctgtcaacatccggttttccggtaatcatctcaaaattaatgaacgattatagcgatcataaacaaaaaataatgaaaatttccgccctttatgtcacggcggccggacttgttctgtttgcgctcatgtatgccggcgcggcgccgttggccggttttatgggtgacgcccgccttgtgatgctgataagggtcgcggcgttcgctttcatactgtttccgtttacggcggttttccgggggtatttccaaggcgtgcatgatatgatgccgtcagccttatcccagattacggaacagcttcttcgcgtggcggtgcttctcggtttatccttctggcttttgaaaagcggccgttcattatacgcggctggtgcgggggcggcttcgggatcaattgccggaagcttggcggccctttgtgtattggctgttttctggtataagcgggaagaaacaaagaaagacggcggacatatcgaaacggccgtcattgtaaaaaagctgctgctttattcagtcaccatctgtatcagcagtgtactcatgcttttgattcagcttgtagacgccttaaacttatattcactgctttcagacgggacggagagccatgctgcgaaacagctgaaaggcatatatgaccgcggacagccgctccttcagctgggaaccgtgtttgccgtcagtatcgccgcgtcattggttccttcaatttcaaaagcggtgcatgagaataagccgtttatcataaaagagaaagcgacatcagccgtcaagctctgccttgcggtagggatcggtgcatcagccgggcttttttgcattttagagccggtgaatatcatgcttttccaaaacagtgaggggacgcagaccttacaaatattcagcttatctatcttttttgcctcgattgcgcttacagcagccgcgattctgcaaggagcgggacataccgttttccccgccgtatccgttttggcgggaggggcgctgaaatgggtgctgaatgtttggctggtccccggctggggtattacaggagcggcactggcgaccgtcttggcatttgccgcagttgcgtgtctgaatctccggagaatttggtcgaagggctggctgacgaatatcggcggcgtgattgcccatctgtgctggtgcagtctgctgatggtcttcttcctgctcgtatatatgaagctatggcagttatttgttcccgtcagcagggccggagctgtatgtgagagtctgtctgcgtcagtcatcggagggctattgtttatttattgtatgataagaatgaagattttcacggacgaagagctgagcggccttcctttcggcagtgctttaagcaaattgaaaaagaggagagaaaaacatggcaggtaacattacggtcgtcggcctcggcgccggagacatggatcagttgacagtgggcatacataagctgctgactcaggcgaagcatttatatataagaacgaaagaccaccctttgattccggaattagagcaagagacggaagcggacatccggtattttgatgatatttatgaaaaacatgatcagtttgaagcggtctatgaagagatcgcggacattctgtttgaaaaagcgaagcaagaggatgtcgtctacgctgtgcccgggcatccgtttgtcgctgagaaaaccgttcagctgttatttgaactccgggaagaacaacaggtagctgttcatactgccggagggcaaagctttttggatgccacttttaatgcattgcgaattgatccgattgaagggtttcaatttacggatgcgcaaacaatgacgccggatgagctcgaactccgccatcatctgatcatttgccaggtttatgaccagatgacggcctctgaggtaaaactgacactcatggagaaattgcctgacgactatgaagtggtcatcgtcacggcagccggaagcaagggagaaaagatgaccaaggtgcctttgtttgagcttgaccgcaatgtagaaataaataacttaacaagcgtgtatgttccgccgattaaaaaagaagaactcctttaccaggaattttctgcattccgaagtattattcgcgagcttcgcgggccgaacggctgtccgtgggatcaaaagcagacacaccagtcattaaagaaatatatgattgaggaatgctacgaactgcttgaggccattgacgaagaggacacggatcacatgatagaagaactcggggacgtcatgcttcaggttatgctgcacgcccagatcggagaagacgaggggtatttctcaattgatgatgtcatcagagacatcagtgcgaagatggtcagacggcacccgcacgtgtttaaggatgttaaggttcaggatgaacatgatgtcgtcgccaactgggaagaaatcaaaaaggcggaaaagcaaacaacatccacttcattgctggatgccgtgccgaaaacactgccttctcttgcaaaagcagccaagcttcagaaaaaagccgcaaaaaccggctttgactgggatgacgttcaggatatatgggataaagtaaatgaagagctgaaggaattttctgcagaggcttccgccgaatcagcagatgaaatcagcttaaaagctgaattcggcgatgttttatttgcattggtcaatatcggccgatactataaaattgagcctgaggaagcgctcgccatgacaaatgacaaatttcgcagacgctttgcttatattgagaaagaagcggcagcaaagggccttgaattgaccgcaatgtcacttgaggaaatggacaaattgtgggatgaagcaaaagaaatggagaggagattctgatatgagacttgataagtttttaaaagtatccagattaattaaacgccgcacattggcgaaagaggtcgccgatcaagggagaatcacagttaacgggaatcaggcgaaagccagctcagacgtaaaagccggtgatgaactgacggtccgcttcggccagaagcttgtcaccgtgaaggtaaacgaattgaaagaaacaacgaaaaaagaagaagccgcgggcatgtatacaatcgtcaaggaagaaaaactcggcgaataggcttgttctaaacaaggctcccgcctcatacaatgcagtaataatgctaaaagtatcgaggatatgggggctgaatagatgaattcatattatgagcaaaaaggttcttcttctgttccggaacagcatgatgtaacgatgaaagggagaaagcatttagacatttcgggcgtcaagcatgtagaaagttttgacaacgaagagtttttgctggaaacggttatgggaatgctttccgtcagaggcgagaacctgcagatgaaaaaccttgatgtggaaaaagggattgtatctataaaaggcagggtgtttgaccttgtatatttagacgagcagcaaggggataaagctaaagggttttttagcaagttgtttaaatgacgctgaccacccaattttatacgatgctggcaatgaccggtatgggcgcctggctcggagcgtcgcttgatacatacaggctgtttgtcagccgcgccaaaacggccagatggctgttattcattcatgacattctcttttggattgtacaaggtctgctgtttttctatgtgctgctcaacgtgaatgaaggagaactcagggtatacattttcttggctgtcttactggggattgcgacgtaccaaagcctgtttaaacgaatgtatataaaaatactgaaatttgccattcatcttgcggtgtctctttaccaattcgcaaaaaagctcattcagcacgtgctgttccgtccggtgcttctgctctttaagctgctcatcgggctgatcacggttatttctttatactcctatcgggtgagtgccttttttgcgaagtgtctttttaagatcgtaacgtttttgctgtatccgctgatttttctgttgaaacaattattgaaacttcttcctgaaaagtggcgtcttactttcaaacgatattttcaaaaaagtgcaggatttttacaaaagagcaagaaactaatcataacaatcagatcgaccatgatacgtattttgaaaaggtgaaaggaggaccgtctggtttgaatctatctagagaacgtacaataactgaaatccaaaacgactataaagagcaggttgaacggcaatcccagcttatgaaaagaaggcggaaagggcttttcagacggttgatcgtattcggcgcccttgtgttgttgacggctattgtcttagcgggttctctgtggtcacagacctcttcccttagcgcaaacgaagaaaagaaagctcagctggaaaaacaagtgaaagaattgaacgcgaaacaggctgatttaaaagatgaaatttccaaattaaaggatgaggattacgtcacagagcttgccagaagagacttgtttatgtcaggaaatggtgagattctcttcaatgtagaaaagaagagcaagtagccttgttgacacttaaatttttatttaggtataattaaacaaacgatctttttataagcctaaggaggagcactttttttatgtcgattgaagttggcagcaagttgcaagggaaaataacaggtattacaaatttcggagcatttgttgaattgcctggaggctcaaccggtctcgttcatatcagtgaggtagccgataattatgttaaagacattaacgagcatttaaaagtcggcgatcaagttgaagtgaaagtcatcaacgttgaaaaagacgggaaaattggtttatcaattaaaaaagctaaagaccgtccgcaagccagacctagaaatgatttccgtccgaaagaatcttttgaacagaaaatgaacaagtttcttaaagatagcgaagaccgcttatcatctttaaaacgaaacacggaatcaaaacgtggagggcgcggagcaagaagaggataacttgctgctttctataaatacatggagcatccgtctatcccagcgggtgctttttttgtatgcgccattatagtcagaaaattaaaacttcaaagtttctgttgacggaatgaagaaacctttgtattatataacttgtgcttataagcacctatatggcggtgtagctcagctggctagagcgtacggttcatacccgtgaggtcgggggttcgatcccctccgccgctaccatatatatctggcccgttggtcaagcggttaagacaccgccctttcacggcggtaacacgggttcgaatcccgtacgggtcatcaagcgaatcggcttctgttgcagaagccgattttttcatatttagacaactttttgagaaatgtcggaggaaatacgaaaggaaaggggaacaagggagaaagcgtcgaagagttctttggaattgttaccttcttttgacaaaatcctatctgggctttcatttataatgacaagcaacgaataaaacaggtgggggatgagagcaatggaaaaagcggaaagaagagtgaacgggccgatggcgggacaagctctggaaaaactgcaatcgttttttgaaaaggcggcaaagcttacagtccatcaagcgcattcactttttttctataagggtttcatttatgtcgtgatcggttttttacttggacgggctttcatattatctgaggttcttccgtttgcgctgccgtttttcggagcgatgcttttgatcagaagagataaagccttctatgcttgtctgtctttacttgcgggcgctttaaccatttcgccgaaacactctttattgattctcacagctttggccgtcttcactctattttcaaaaatcggtacatatatcgtgcaggaccgggtgaagatgctgccgatcgtggtgtttttctctatggctgccgcgagaatcggatttgtttattttgagagcggcgcttttaccacctatgattatgtgatggctgttgtcgaggcgggcctggcctttattttgacgctgatctttttgcaaagcctgccgatcttcacgatcaaaaaagtgaagcaatcgttaaaaatagaagaaatcatctgttttatgatcttgatcgcatccgttttaaccgggcttgccggtgtttcatttcagggaatgcaggctgaacatatcctggcccgctatgtcgtgctgagtttttcctttgtcggcggggcaagcatcggctgtacggtcggtgtggtgaccggactgatcctcgggcttgcgaatatcgggaacctctatcaaatgagtctgcttgcgttttccgggcttcttggcgggctgctgaaagaaggaaagaaagccggagccgcagtcgggttagtgatcggctcactgctgatttcattatatggagaagggtctgccggattaatgaccactctttatgaatctttgattgccgttgttttgtttttgattacgccccaatcgattacgaaaaaggtggcgcgatacataccgggcactgctgagcacagtcaggaacagcagcagtacgcgaggaaaatcagagatgtcaccgcccagaaagtagaccagttctccaatgtgtttcatgccttgtcggagagcttcgccacctttcatcagacgtcttccgatgagcaggcggaagaaggggaagtggatctctttttaagcaaaatcaccgagcattcctgccaatcctgctataagaaaagcaaatgctgggttcaaaactttgataaaacatatgacttaatgaaacaagttatgcatgaaacagaagaaaaacagtatgcctcaaaccgcagattaaaaaaggagtttcaacagcactgttccaaatccagacaggtggaagagctgattgaggacgaacttgcccaccatcacgcccatctgacactgaagagaaaagttcaggacagcagaaggcttgttgccgagcagctgttgggggtttctgaggtcatggcggacttttctcgggaaataaaacgggagagggagcagcattttattcaggaagaacaaatgatagaggcgcttcagcattttggaatcgagattcagcatgtcgagatatacagcttggagcagggcaatattgatatcgaaatgacaatcccgttcagcggaggacacggcgagagtgagaaaattatcgccccgatgctgtctgacattcttgaggagcagatacttgtcaaaagcgaacagcactcgactcatccgaatggctacagccatgtcgcattcggttcgaccaagtcgtaccgggtatcgacaggcgcggctcatgcggcaaaaggcggcggccttgtctccggcgacagctacagcatgatggaactgggggcgagaaagtatgcggccgcgatcagtgacggcatgggcaatggggcgagggcccattatgagagcaatgaaacgattaagctgctcgaaaaaattctcgaatcaggtattgatgaaaaaatagcgataaaaacgatcaacagtattctgtctttacggacgacagacgaaatctactcaactctcgatctttctatcattgatcttcaggatgcaagctgcaaattcttgaaggtcggttcaacgccgagttttatcaagcggggagatcaagtcatgaaagtgcaggccagcaatctgccgatcggcatcatcaatgaatttgatgtggaggttgtaagtgaacagttaaaagcgggagatctgctcgtcatgatgagtgacggtatttttgaagggccgaagcacgttgaaaaccacgacctgtggatgaaacggaaaatgaaagggctgaaaaccgaagacccgcaagaaatcgctgatatattaatggaagaggtcatcagaacgcgttccggccaaatcgaagacgatatgacagtggttgttgtccggattgaccacaacacgccgaaatgggcttccataccggtgccggcggttttccaaaataaaaaggagatttcttaatccattcgtataaatcactttccttctggcgaagatgggactaatcgtatcaccgggaggaatgtatgtgaataagggacatttaaatcaagttctgctgattacagatggctgctccaatcatggtgaagacccgattgcaatggcggctttcgccaaggagcaggggattacggtgaatgttataggaattatggaagaaaacgcgattgaccaagaagcaatgaaggaagttgaaggcatcgccatggccggaggcggcgtccatcaagttgtgtatgcgtcacaattgtctcagacggttcaaatggtgacgaaaaaagcaatgacccagacgctgcaaggtgtcgtcaatcaagagcttaaacaaattttagggaaaaacgttgaaatggaagagctttctcctgaaaaacgcggcgaagtgatggaagtggttgatgaactcggcgaaacggttcatctgcaagtgcttgtgctggttgatacgagtgcgagtatggcgccgaaactgccgacggtgaaagaagcgctgatcgatctttccatcagtttaaattcccgggccgggcaaaatgaatttgcaatgtgtatatttcccgggaaaagccaggaagttgagcttgtgctgaattggacgccgaagcttgaatccctttctgcactctttgcgaagctgtcgaccggcggtatcacccctacgggccccgctatccgggaagcgacgcagcagtttgagagaatccgctcaagaaggagcatgttggcagatgatgaacgacgctttaacgagtttggcatgtagtctggcaccggggacggcaattcagggcaaatggaacggcaaatcctacagattgctcaaacagcttggaaaaggggctaacggtattgtatatctggcagaagcatcaggcggacaggtcgctttgaaaataagcagcgacagcatgtctgttacctctgaagtgaatgtcttaaaatccttttcaaaggcccggtcgcaaacgatggggccttctttttttgatgcggacgacgcgtttattccgcagctgaataaaaatgtctctttttacgtgatggagtacatagaagggccgcttcttccgcaatatatcagcagtaagggaacagagtggattccggtgctgatggtgcagcttctttccagcctgtcagtccttcatcagcaagggtgggtttttggcgacctcaaaccggacaatctcattgtaaccggaccaccggctgccattcgctgcattgatgtagggggaacgacaaaacagggccgcgcgattaaagagtatacggagttttacgacaggggctattgggggtatggaacaagaaaagcagaaccatcctatgacctgtttgctgtcgcaatgatcatgatccactgtgcccagaagaaagagtgcaaaaagtcaggacagccgaaagaacagcttcgttctatcattgaaggccacccgtttctgaataagtataagaaggttctgttttctgcttttaacggccaatatccgtctgcggaagccatgaagcatgacatcctgacggcggggcagagtgcagggagtaaaaggaaagccgccgccaagcctaagccgccgcaatcaaaaccgcggcagggcactgtatctcaaacgcggtataaacctaaacaaaaacccgcaaagcacaatggtttgtttgaaacaacacttattttaatcagcgttctcgccctttatttcgcttacatcgtcttttttctcatctagtgccggccggacgcctgcgctcatgcttcttctttgcttggagggaatgaaagtgataggatatgtatatctttaaaaaacctgctcattgtgagggggacattgtgaaaagcgtggaagattttttcaaaacatatcatcttcaggcggagggagaaacgattattgccggggtctccggaggccctgattcaatggcgcttctcagtatgctgaataagcacttcgggcattcctccgttatcatagcggcgcatgtcgaccatcagttcaggggtcctgaatctgaagaagatatgaagtttgtgcagtcatattgcgaagcggaacacatcctctgcgaaacggtacagattgatgtttctgcatacgcaaagaagaataagctgaacaagcaggctgccgcgcgtgattgcagatatcagtttttcgaagatctgatgacaaaacaccaagcgaagtttttggcgctggctcatcacggcgatgaccaggttgagacaatgctcatgaggcttgcgaaaggtacgctcggggcagggcttgcgggaatgcagcccgtccgcgaatttgcatccggctggctgatcaggcctttcctctatgcggcaaaggatgaaatccttgaatactgccgtcaagaagggctcagctacagaacggatgagagcaatgcaaaagacgattatacaagaaacagattcagaaagaccgtgcttccttttttaaaacatgaatcacctgacgttcataaaatgtttcaaaaggtgagtgaagcactgacagaagacgaacaatacctgcagtcattaacgaaagaacgaatgaataaggttattacaagcaagtcagacacatcggttgaagtcaattcctctcaattgcttgcccttccgatacctttacaaagaagaggagttcaactaatattaaactatctttatgaaaacgttccatcgtcgttttccgcccgccacatacagcagtttctcgaatgggcggaaaatggaagcgcctcgggagtgcttgattttccgaaagggctgaaggtggtcaaatcatatcagacatgtttgtttacatttgaacaatggcaatgtgaaaaagttccctttgagctgcagctgcaaggagcgaaaggcgagactgctgttctccccaacggctttatgatagaggtggccgatcaggctgatcctcatatcaaaaatgggaatgctgtttttatgacaagcagaaacaaggtgcaatttcctttaacaatccggacgagaaaaatcggcgaccggatcaaacttaaagggatgaatggctcgaaaaaggtgaaagatatatttattgatcataaactgcctctgcgggatcgggacgaatggccgattgtaacggatgcgagcggtgaaattatctggctgcctggcttgaaaaaatccatctttgacgatcttgtgatttcaaacagtgaccgcattgtattacaatatagacagcatgaaaagtgtagggggcaagcattaacatgaaacaggatatcgaaaaagtgctgatctcagaagatgagatccagcagaaagtaaaacagcttggagaacaattaacaagcgagtacagcgacacgtttccgttggcaatcggtgtgttaaagggagcgcttccttttatggctgatcttataaagcatattgatacatatttggaaatggacttcatggatgtatcaagctacggaaattccacggtttcttccggagaagtcaaaatcatcaaagatttggatacatctgtagaaggccgggacatcttaatcattgaagatattatcgacagtgggttaaccttgagctatctcgtagaactcttccgatatcgtaaagcgaaatcaattaagattgttaccctgttggataaaccaagcggaagaaaagcggacattaaagcagacttcgtaggctttgaagttcctgacgcgtttgttgtgggttacggacttgattatgccgaacgctatcgcaatctgccttacatcggagtattaaaaccggcgatttatgaaagctgatcggctgcctgcttccgagatggttatcggttgtattggaatgattttctatggtactattgaacatagttgtgcttactgtgggaggaggtaaggaatgaatcgggtcttccgtaataccattttttatttacttattttattagtagtaatcggggttgtgagttacttccagacttcaaacccgaagacagaaaatatgtcgtacagtacgtttatcaagaacctcgatgaggggaaagttgatagcgtatcggttcagcctgtcagaggtgtttatgaggtaaaaggacagctgaaaaaatacgacaaagaccagtactttttaacacatgttcctgaaggaaagggagcagaccagatatttgatgcaattaaaaagacggacgtaaaagttgatcccgcacaggaaacaagcgggtgggtgacgttcttaacgacgatcattccgtttgtcatcatctttattctgtttttcttcctgctcaatcaggctcagggcggcggcagccgtgtcatgaacttcggaaagagcaaagcgaagctgtatacggaagaaaagaaacgcgtgaagtttaaagatgtagccggcgcggatgaggagaagcaggagcttgttgaggttgttgagtttctgaaagatcctcgcaaattcgccgagcttggcgccagaattcctaaaggcgtgctgctggtcggacctccgggaaccggtaagacattgcttgcgagagcctcagccggtgaagcgggcgttcctttcttcagcatcagcggatctgacttcgttgaaatgtttgtcggtgtcggtgcttcccgtgtgcgtgatttattcgaaaatgcgaaaaagaatgcgccttgtctgatcttcattgatgagatcgacgcggtaggacgtcagcgcggcgcaggtcttggcggcgggcatgatgaacgcgaacagacgctgaaccagctgcttgttgagatggacggtttcagtgcgaatgaaggaatcattattatcgctgcgacaaaccgtgcggacattctcgaccctgcattgcttcgtccgggacgttttgaccgtcagattacggtagaccgtccggatgtcatcggccgtgaagccgtattacaggtccatgcgagaaacaaaccgcttgatgaaacggtgaacttaaaagcaatcgcttcaagaacacccggtttctcaggcgccgatttagaaaaccttcttaacgaagcggcacttgttgctgcccgtcaaaacaagaagaaaattgatatgcgcgacattgatgaagcgacggaccgtgtcattgcgggtcctgcgaagaagagccgcgtcatatcgaaaaaagaacgcaatatcgtggcgtaccacgagggcggtcacaccgttatcggacttgtgctggatgaagccgatatggttcataaagtaacgatcgttccgagggggcaggcgggcggatacgcggtcatgcttccgagagaagaccgttacttccagacaaaacctgaacttctcgataaaattgtcggtcttctgggcggacgggttgccgaggaaattatcttcggcgaagtcagcacgggggctcacaatgacttccagcgggcaacgagcattgccagaagaatggtgacagagttcggtatgtcagaaaaactcggaccgcttcagttcggtcaatctcaaggcggtcaagtattcctgggccgggatttcaacaacgagcagaactacagtgatcagatcgcttacgaaatcgatcaggaaattcagcgcatcattaaagaatgttatgagcgtgcgaaaaccatcctgactgaaaatcgcgataagcttgaattgattgctcagacattgcttgatgtggaaacattagatgcggaacaaatcaagcatctcgtggatcacggaaaactccctgagcgcaatttctcagatgaccatcttcaaaaagacgatgtgaaagtaaacatcctgtctaaaacagaagacgaaaagaaagacgagccgaaagaatagttcgctttctgatatgaaaaccgccggcgtataccggcggtttttttactggttccgttttgtttacaaaagagccgcagatcgtgtatggtattgtagaatgttgaaaatgttatgattagaaactattcaaaagtggtgatagaggttgttactggttatagatgtggggaacaccaacaccgtgattggtgtatatcatgatggggaattagaatatcattggcgcatagaaacgagcaggcacaaaacagaagacgaattcggcatgctgctccgctccttatttgaacattccggactcatgtttgaacagattgaagggattatcatctcatccgtggtgccgccgattatgttctctttagaaagaatgtgcacaaaatactttcacatcgagccgcaagttgtcggcccgggaatgaaaacaggtttaaatataaagtatgacaatccgaaagaagtgggagctgacaggatcgtcaatgccgttgcggcgatccagcagtatggcggccccttaattgttgttgatttcggaacggcgacgacgtattgctacattgatgaaaacaaacaatacatgggcggcgcgattgctcccggcattacgatttcaacggaagcgctgtactcacgtgcggcgaagcttccaagaattgaaattgcccgtccggacaatatcatcggcaaaaacacggtaagcgccatgcagtccggcatcctttttggctatgtcggacaagttgaaggtatagtgaagcggatgaaatggcaggcaacacaggaaccgaaagtcattgcgacaggcgggcttgcgtcattaatcgcaaacgaatcagactgtattgatattgttgacccgtttctcactctgaaagggctggaaatcatttatgagcgaaatcgcgtgggtcacgtataggaggtaaacgatggattatttaattaaagcaattgcatatgacggtaaagtgcgggcttatgcagccagaacgacagatatggttaatgaagcgcaaagaaggcatgacacgtggccgacggcatcagccgcaatcggccggacgatgacagcttctctgatgctaggagcgatgcttaagggtgaagataagctgacagtcaaaatagaaggcggcggcccgatcggagccattgtcgcagatgcgaacgcaaagggtgaggtaagagcatacgtatcaaacccgcacgttcattttgatctcaatgaacaagggaaactggatgtcagacgggcggtcggaactgatggaacactcagtgtcgtaaaagatttgggcttgcgtgattattttacgggacaagtagagattgtctcgggtgaactcggtgacgacttcacatattatcttgtttcttctgaacaagtcccttcatctgtcggcgtaggtgttctggtaaatcctgataacacgattctcgctgcgggcgggttcatcattcagcttcttccggggactgatgaagaaaccatttcaacaattgaaaagcaattatctcaaatcgaaccgatttcaaaattgattcaaaaaggcctgacaccggaagaaatcttggaagaagttctgggtcaaaaaccggacgttctcgaaacaatgccggtcaaatttcactgttcttgttcaaaagatcgattcgaaacggccattttaggactaggcaaaaaagaaatacaagatatgatagaagaagacggaaaagccgaagcggtttgccatttttgtaatgagaaatatttatttacaaaagaagaactggaagagcttcgtgacgaaacaacccgctagctctttagcgggttgttctattttataaaagggatggggtagattttgaaatcgagaacacttttgacgattattgtagcggcgctgttagtatgcagtgtgacagtggcgtataagttaacaaaatcccaagccgcggggtcatctgaagaatccatcgcgacaatcggtgataaacatatcacacggcaagactggatgaaaaagatggaagaccagtacggaaaatcaactctggaagacatgattaatgcagaagtagtggaagagcttgcgaaaaagaataaactcacagtttcaaacagcgaattggagcgggagtttcttttaatcaaagcggtagataattcattttatgaagacagccatattaccgaaaaagaatggagagaccagatccgctacaacattcttcttgaagaactgctgacgaaggacatcgatatatcggataaggaaatgcaatcattttataataaaaataaagaattgtaccatttcgatgattcatacagaatccggcacattgtcgtcaaaaacaaagatgaggcggacagggtgcttgctgatttgaaaggcggttccagctttgaagccgtcgccgctgagcgttccacggacagatacacgtctcagtatggcggagacctcggctttgtgacagaaaaccaggaaaatatcccgcaggcatatatcacagaagctaaaaatcttaaagaagatgaatggtccgctgaaccgattaaagtttcttcaggatacgccgtcattcagctgaaagaaaagcttaaagcgagaactttctcatacaatgaagtgaagagccaaatcagacgccagatcgcgatggatcaattaggtgacaaggcgacagtcaaaacgctgtggaaagaggcgggggtctcttggttctacggggaaaaaagaactaaatgattgacaaaaaattttgaaattgataacttatatttataataccaataaatttagtcggaaattgaggtgtccaacatggtgcgtattgcaaattctattactgaactaatcggaaatactcctattgtgaaattgaatcgcctgacggatgaaaacagtgcagatgtatatctgaagcttgaatacatgaatccgggcagcagcgtaaaagatcggatcggagtggcgatgattgaagcggctgaaaaagaaggaaaattaaaagccggcgacacaatcattgaaccgacaagcggaaatacaggaatcggtcttgcgatggtggcagcggctaaaggtctcagagccattctcgttatgcctgatacaatgagtatggagcgacgcaatctgctgcgcgcatacggagcggagcttgtgctgactcccggcgcagaaggaatgaagggcgccattaaaaaggcggaagaacttgccgaggaacacggatactttgtgcctcagcaattcaacaatgcggcaaacccggaaattcaccgccaaacgacggggaaagaaatcgtagaacagtttggtgacgaccagcttgatgcgttcgtggccggaatcggtaccggcggaaccatcacgggagcgggcgaagtactgaaagaagcatatccatccatcaaaatctatgcggtagagccggcggattctccagttctttccggcggaaaaccgggcccgcataaaattcagggtatcggagcgggatttgtccctgaaacattgaatacggacatctatgatcagatcattcccgtcaaaaacgaggatgcatttgaatatgcccgtaaaacggcaaaagaagaagggattctcggcggcatttcttccggagcggccatttacgcggcactggaaatcgcgaaaaaactggggaaaggcaagaaagtgcttgcgatcatccctagtaacggagaacgttacttaagcacaccgctttatcagtttgaatagagacatacacacggctcccggctgtatccgggagtttttttgtgcctgaagcatcgaaaatccaaaaaacgtttcgaattttatggttggaagtgaaattcacttttttcaccagtgtgattgctttaaaataaaactacagtaaaacgaagcagaggattgatatgatggcacaacgcagaccggcaggaagaaaaataccttttacgaaacaagcatttttacagcgatatgaaaacctttcgaaatcgagaaaacggcatgttctgctcgaaagcgcgagagggggaagattcagtatagccggtctagatccgattgcgtccgtcagagggaaagacggaattacaacgatcaagcatgagggggaaacactgtttaaagaaggtgacccgctgcgggcctttcatgaatggtttggaacgctcggaacggaaacaaacgttgagtttccggactttcaaggcggtgcgattggttttatcagttacgactacgcccgatatattgagaattttaagatgctgtcgttagatgatctggaaacacctgatatttactttcttgtttttgatgatgtggccgtttatgaccatgaggaagaggcgttatggctcattacccatactgaagcggaagaagcggatcttgcggaagaaaagctgtccggcttagaggacatgtggtgttccctccaaacggcggacgagcctttttcaccgctgaatcggaatggggacggatcgtacgccgctccgttcactgaagaaggattttcgcaggctgtagaacaaattaaacaatatatcgcgagcggcgatgtgttccaggttaatttgtccatcaggcagtctcagtccttatccgttcatccgtatgaggtgtataaacacttgagaaacgtcaatccgtctccttatatggcctatctcgagacaccggggtttcaagtgatatgcgggtcgccggagctattggtgacaaagaaggggaagaagcttgaaacgagaccgatcgcgggtacgcgttcaagaggaaaagacgatgctgaagacaaggctttggctgatgaattaattcacaacgaaaaagaacgtgcggaacacgtcatgcttgttgatcttgagcgcaatgacctcgggcgcgtatcgcgctacggctccgtgcgggttaacgaatttatggcgatcgaaaagtattcccacgtcatgcatatcgtgtcaaacgtacagggggaactgcaggacggatatgacgcgacagacattattcatgcggttttcccggggggcaccatcacgggagcgcccaaagtgagaacgatggaaattatagaagagcttgagccgacaagacgggggctttatactggatctataggctggttcggattcaacggagatttgcagtttaacattgtgatccggacgatctatgcagccggcggacatgctttcatgcagtccggagcaggagtagtcattgattcggttccgaagcatgaatacaaggaatcgttcaaaaaagcttttgcaatgaaaaaggcgttagagctgagcgaagaagagacaaaaaattagacgaggtgagcagagatgattttaatgattgacaattatgattcatttacgtacaacttggttcaatatttgggtgagctcggggaggaactgatcgtcagacggaatgacgagattacaattgagcagattgaagagctggcaccggatttcttaatgatttcacccgggccgtgcagtcctgatgaagcggggatcagcctcgaagcgatcaaacattttgccggcagtattcctattttcggcgtatgtctcgggcatcagtcgattgcgcaagtattcggcggcgatgtcgtcagagcggagcggctcatgcacggcaaaacgtcagaagttatgcatgacggacagacgatttttaaaggcctgcaaaatccgcttgtcgccacccggtaccattcacttattgtcaaagcggacacgctgccggagtgttttacggtatccgctcaaaccaaagaaggagaaattatggcaatccgccataatgagctgcctgttgaaggtgttcagttccatccggaatccatcatgacctccttcggcaaagagatgctcagaaactttatagagacacaccgcaaaaaggaagtgacggtgtgattatatatttgaatggtcaatatatagaggagaaagaagcggcgctttctccttttgaccatggttatctgtacgggatcggcgcgttcgagacgttcaggctttacagcggccggccgtttttgccggatgcgcatgtcgccaggctcaacagggcgcttcgggatgtgcagattgcatatgaggtgaacaaacaggagctgcttgatatgcttcggagactgttgctcctcaatgacatcaaggacggcagcgcgcgtgtccggcttaacatctcggcaggagtcagcgataaagggtttgccgcgcagacttatgaaaagccgaccgtcctttgtttcgtcaaccggctcaatccggaaactctgcctgttcaaaaagaaggcaagcttctctctatcaggagaaatacgcctgaaggatatttccggttaaaatcccatcactatttaaacaacatgtatgctaaacgggagatcgggaatgatcccaatcttgaaggcattttcctgaccggagaaggagatgtcgcggaaggcattgtctccaacgtgttttggcgaaaaggagacaaggtctttacgccatccttggatacgggaattctcgatggtgtaacgagacagtttgtcattgatgaattgaaacggcaggggacagaagtcaccgaaggccgattccgttttcaatcaatgcttgaagcggatgaagcatggttgacaaactccgtgcttgaaatcatcccgttttctaaaatagaggaagtgccgctgcccggagtgagcggaaaaacggtgcaattgctccgtaatcagtatcagcaggaaataaacaaaatgaatgtacaggaggaggaacaaaatggcgcagcaaacaattgaacagcctaaactgattcatacaaaaaaaggcgctctttcctataaagagaagacgctcgttatggggatattaaatgtaacgccagactccttctctgacggcggcaaatacgacagtacggaaagggcgcttctgcatgcggcgaagatggctgaagaaggggcgcatatcatagatatcggcggcgaatcgacaagacccggcgcatcactcgtgtcggctgatgaggaaatgtcacgagtcatccccgtcatagagcggatcacaagcgagctggacattccgctttcaatcgatacgtacaaagcgtccgtggcagacgaagcggtcaaagcgggagcctctatccttaatgacatctggggggcgaaaggtgatcctgacatggcgtcagtagccgccgcacacggggttccgattatcttaatgcataatcgcatggaaagaaactacaacgatcttattcctgatatgcttgcagacttgatggaaagcgtaaaaattgccgcagaagccggcgtcacagatgaaaacatgattctggatccggggatcggctttgcgaaaaactatgaggacaacctggctgtcatgaacaagctggaggtgttcagcgggttaggttatccgctgctcctggcgacatcgagaaaaaggttcatcggccgtgtgcttgaccttccccctgaagaacgtgctgagggaacgggagcgacagtatgccttggcgtccagaaaggctgcgacattgtgagggtgcacgatgtcaaagagatcgcaagaatgactaagatgatggatgctatgttgaacaaaggaggcgcacattatggataaagtatatgtagaaggtatggagttttacggatatcacggcgtgttcgaagaagaaaacaaactcggccagcgcttcaaagtagacctgactgccgaactggatttgagcaaagcgggaaaaacggatgacctctcttataccattaactatgcggaattgtacagtgtctgccgcggcatcgttgagggcgagcccgttaatttggtcgagacccttgcggaacggatcgcagacaccgtccttgagaaatttgagccggtgcagcaatgtacggtaaaggttgttaagcctgacccgccgattcccggccattataaatcagtagccatagaaatgacgagaaagaaatcatgaacaatacggcatatatcggcctcggctccaatatgggcgaccgtgaacattatttgcgccaggcagtggccatgctcagccggcatcatggcgtgacggtgtcaaaggtgtcctccatatatgaaacagatcccgtcggctatgaggatcaagatcagtttctcaatatggcggttgaagtaaaaacgtcgttatctccttttgaacttcttgatgtaacgcagagcattgaagctgaattaggcagaacgagagagattcgctggggaccgcggacggcagaccttgacattttgctgtataatcgtgaaaatattgaaacagagcggctgattgttccgcatccgagaatgtatgagcgcttatttgtccttgcgccgttaaaagaaatatgtccgcaggcggatcatatcacgataagcgctgaaacaaaccaagaaggtgtaagagtatggaagcagaaatctggggtaggcgaattcgtgcattcagaaagctgaaaggttatactcaagaaggatttgcaaaagcattaggtatatcagtttctattgtcggtgaaattgaacgcggaaaccgattgccgtcagatgccatcattcaagctgcggcagatgttttaaatataagtgcggacgaattggccccgcctgaaaaatagacaaatgaaaggaggggaaaaatgtttaaaatcggtgatattcaattgaaaaaccgggttgtgcttgcccctatggccggtgtctgcaactcagcgttcagattgactgtaaaggaattcggagccggattggtatgcgctgaaatggtcagtgacaaagcgattctttacaataacgccagaacaatggggatgctttacattgatgaacgtgaaaaaccgctcagccttcagatttttggaggaaaaaaggaaacccttgtggaagcggcgaagtttgtagatcaaaacacgactgctgatattattgatattaacatgggatgtcccgtacccaagattacaaaatgtgatgcgggcgccaaatggcttctcgatcccgataagatttatgaaatggtatccgcagtagtagatgctgttgataagccggttacagtgaagatgagaatgggctgggatgaagagcacatttatgcggtgaaaaatgcccaagccgttgaacgtgccggcggaaaagccgttgccctgcacggacgcacaagagtgcaaatgtatgaaggcactgcgaactgggatatcattaaagaagtgaagcaatccgtctccattcccgtcatcggaaacggtgatgtcaaaacgcctcaggacgcgaaacgcatgcttgaggaaacaggagttgacggcgtcatgatcggccgggccgcactcggcaacccgtggatgatttaccgtacggtgcactaccttgaaaccggcgagttaaaagacgaaccgaaagtccgtgaaaaaatgtcggtatgcaaactgcacttagaccgcctgattaagttaaaaggcgaaaatgtggcagtcagagaaatgagaaaacacgctgcctggtacctgaaaggtgtcagaggcaatgcgaatgtacgtaacgaaattaaccaatgtgagacgcgtgaagaagttgtgcagcttttagatgcatttaccgccgaagcagaggcaaaagagcttcaagatgcaaaagtaggttaatatacaccctctattgctgctcactgccagcttaccgctggcagtttttctgctttttcgtgaaatcaaaatgtaacggagtgataccaatgagtcaagaagagcaaaatcatgaggaattgaacgaccagctgcaagtcagacgagataaaatgaaccagctgagagaaaacggcattgaccctttcggcgaacgtttcgagagaacgcatcaatctcaacagatcattgacgcctaccaggagctttctaaagaagaactggaagaaaaagcgatcgaagtgaccattgcaggccgtatgatgacaaagcgcggaaaagggaaagccggctttgcgcatctgcaggacttagaaggtcaaattcaaatttacgtaagaaaagacagtgtcggcgaagaacaatatgaaatctttaaatcttcagacctcggagacgttatcggcatcacggggaaagttttcaaaacaaacgtaggcgagctttctgtcaaagcgacatctttcgaactgctgacaaaagcactgcgtcctcttcctgataaatatcatgggttaaaagacgttgaacagcgttaccgccagcgctatctcgatctcatcgtaaaccctgacagcaaacaaacgtttatcacacgcggcaaaatcatccaagcgatgagaagatacttagatgaccatggatacttagaagttgaaacacctacgatgcacagcataccgggaggagcgtctgcacgcccgttcatcacgcaccataacgcactcgacatgcctctttatatgcgtattgcgattgaactgcacctgaaacgcctgattgtcggcggattggaaaaagtctacgaaatcggccgcgtgttccgtaacgaaggtgtttctacacgccacaaccctgaattcacgatgatcgagctgtatgaagcgtacgccgattataaagatattatgagtcttacggaaaacctcgtagcacatattgcgcaggaagtgcttggaagcaccacaatccagtacggcgaagagcagattgatctgaaacctgaatggaaacgactccacatggtagatgcggtcaaagaagcgacaggtgtagatttctggaatgagatgactgttgaagaagcgcgcggtcatgcaaaagagcatggtatcgagatcacaaactcaatgacggtgggtcatatcatcaatgaattcttcgaacaaaaaattgaagaaacactcattcagcctacatttatttacggccaccctgtagagatttctcctcttgctaagaaaaatccggaggaccctcgctttacagaccgttttgagctgtttatcgtcggccgtgagcacgctaatgcgtttacggagctgaatgaccctattgaccagagggaacgctttgaagcgcagttaaaagaaagagaagaaggaaacgatgaagcgcatatgatggatgaagacttcgttgaagctcttgaatacggcatgccgccgaccgggggattgggtatcggtatcgaccgccttgtcatgctgttaacaaatgctccgtctatcagagacgttttattattccctcaaatgagacaacgataataaaagggaaggcgccgtttctgcttatcgcagtacggcgcttttttagaaacaagccgctcgtaaaacttttttgattttcttttaaaaaactattgcactattatttgtgaggtggtatattattattcgttgccgctaaacaaggcgctgacgaaaaaagaaatttaaaaagttgttgacttcaagagattgataagatataataataaagtcgcttgaacaaaagacaaaatgatctttgaaaactaaacaagacaaaacgtacctgttaattcaaagttttaaataaatcgcacagcgatgtgcgtagtcagtcaaactactttatcggagagtttgatcctggctcaggacgaacgctggcggcgtgcctaatacatgcaagtcgagcggacagatgggagcttgctccctgatgttagcggcggacgggtgagtaacacgtgggtaacctgcctgtaagactgggataactccgggaaaccggggctaataccggatggttgtctgaaccgcatggttcagacataaaaggtggcttcggctaccacttacagatggacccgcggcgcattagctagttggtgaggtaacggctcaccaaggcgacgatgcgtagccgacctgagagggtgatcggccacactgggactgagacacggcccagactcctacgggaggcagcagtagggaatcttccgcaatggacgaaagtctgacggagcaacgccgcgtgagtgatgaaggttttcggatcgtaaagctctgttgttagggaagaacaagtgccgttcaaatagggcggcaccttgacggtacctaaccagaaagccacggctaactacgtgccattcgactaggccgtcttctgtccagcgtgcgatatcgcccgtctgatacatgcgttctcccgggtaaaacggatcatcgagaaaacgctcctccgtcagctcaggccggttcagatagccccgggccacccctgtccccgcgatgtacagctctcctgccacgcccgcaggctggatggttcctccgctatctaatacatacagacgggcacccggaacgggttttccgatcggaagccttgtccgtccgctgtcccgttttcggtcacagacgtaaaacgccgcatcaaccgtcgcttctgtcggtccatagccgtgaataagcatcgtctccggcaacagatctgcaaaccgggcagccgtaagcggggaaagagcttcgcctccggcaaacacgcgtgtcagtgttctgccgaggcgtgttcttgtttcctcaggctccgtttccagcgcgtctaaaaagctgttgaccattgccggaataaaatgcgcggtcgtcaccttttctgaggcaaacgcttcaatcatccgcacaggatctttctcccagccggccggaagcagatacacggaggcgcctgacatcgtccaccaaaacaattgccagatggaagcgtcgaaagaaaaggatgatttcagcacgataatatcctcttccgtcaacgggaactgcccttgcatccctgataaaaaggcggcggcctgacggtgttcaacagccactcccttcggtgttcccgtcgaaccggacgtataaatgatataagcgagcgaatcgctatccgcttcgtcagagacagcccctgtctccgtctcgcctgtcagagaagaaagagacacttcaagcgtttctccggaaaaaccggaaacggataaccccggctgtgcaagcaggagacaagcgccgcagtcatcgagcatatagcgcagcctgtcctcaggatactccgggtcaagcggcacgtaggcgccgcccgcttttaacacggcaagcacagaaaccaccatctccggcgagcgttcagcgagcacgccgaccatgctttctttgcggacgcctttttgtcggagccgaacggcgagcctgtctgtgtactggtcaagctcggcgtacgtcagcataccgcccggaaaacggagcgccggacgatgcggcgaaagcgcggcacggcgggtaaacagcccgtgaagcgtcggagccggcggttcaaccgtttctgtacggttaaacgcatccagcatatttctggcttcacacgcatcaagcaatgcgatctcggaggcgctcatttcagggtcggaaatgactgacttcatcatatgccgtaaaaatgtttcaatattcttcataaaaacacgatcgtatataccggtatcaaagtttaagcggatataaagagaatttcccggaatcacctttatgctgcatccgtagtttgtgacttcctccatcgtgaaatcttctaccgcaaaatcaaatgaacctgcctgactcacattttcaatttcacgctgggccggcacattttcaaacacgataatgtggtcaaacagcgcttgcttcaaagggctttgcgcctgaatgtcatacagcggataatagctgtacgcttctgcttgcagcgtctcctgctgcaaatgcctgacgagctccagaaaagaaaatgaaccgcttttcacccgcacgggaatcgtattaataaacaggcccaccattttttccacgcctgcgagatccgacggccggccggaaacgacagaaccgaaaacggcgtcatcacagcggctgacacgctgcagcaacaggccccacagtgcctggaacactgtattcagcgttgctcccgcccttgccgcaatgttcttcagctcatttgtctgctcttcagaaatggtgaaaaccgcctgctcaagttcgccatttggttctgcagattttttcggaagagacgccgattgctcaagatcggcaagtctcgttttccaaaaaatctcggcttctttacgatcctgcttcatgagccatttaatatactttccatatggctgaacaggctcgagagacgggagccgtccgtctccgagagattgatagatcatcagaaattccttcatgacaattccgaagcaccagccgtccatgacgatatgatgatggctccatatacaaacatagcgttcaggcgcttttttcaaaatggagactctcatgagagggtctgattgcaaatcaaagcctttatctttatcttcttttctgaatcggtcggcatatttatcttgtgccttctcgtccaaatgagaaatatcatgaaactgaacgcggctcggcctgtttttcaacacgacttggcggggcttcgccacattcttatgaataaatgtcgtacggaaaatatcgtatcgttcaaaaacagcatctatacttttttggaatcgttcccggtcaagctgtccgctgatcgtaaacaccgcttgttcgaagtaggctcttgagtcatgatccaacagagaatgaaaaagcatgccctcctgcataaaagataaaggatatatatcttgtatttccggttgctgccccattgcgccactccttttctatagtttgttgacggctcccataatgtcactcagatcttccagcgttaactcctcgtcactgaaatcagcggcgctccattcacgctcctctttgcctgtgcaatgcgtgatgatttgcttgagaaaggcatgaaaatatcccgtcaaaacttcaatcgtttctttttgatactgaaaacggttgtacacgacatgcatgctgagacattccgacgatacggagccgctgatatcaagtgtgtacggacgttcccagtctgggctgacttcatttcccgcttttacgggagaaacaccaaagccgctggaacggatttcacggtcaaactgtcccagatagttaaaactgatttcaggagaatcggattcagtctcttcccagagtttgcttatatacttcagcaccccgtatcccgctcctttatgcggaatgcggcgcatcatgtcttttgtccgcttaatgtgatagccgagccgctcgccgtcatcagcctgatcttgaaaacttgcgtcaaccaataccggataaattgacgtaaaccaaccgatggttctgctgatatcaagatgctccaagtgctcttcccttccgtggccttccatgctgattttgaatgtctcgtttccggtccatctgttcagcgcaaggcttaacgcggcaagcaataattcacccgtctctgttgtgtatgctctgttcgcttccgttaacagctgctcagtctcctgtttcgtcaatgtaacggtcatcacatctgtatctttcagaagattggaagagatgcgggcatctttcggaagcggttcgaccgccgctctttctctttcggaccagtagtctgcttcctgtaacagccggcggctttttgcataatcagagatttgcttcgcgtaagtctgataggaatcggtttttgccggaagcgcggtttcttttcctgcgagcgcctgcctgtagcacgcggtgagatcttcaaataaaatccgccatgatacaccgtcaatgacaaggtgatgaatagaaagcagcagatgatcgccatcattagcgtgaaataatccgacagctacgagcggacccgtctccagccgaatggaagtttgaatacgggcggccgcctgttcaattgcggcgtgctcctcttgtaatgaccctttccctctcacgtcatgcgtttcaaacgtaaagagttcttcttcagaaaggttttccgctctgttgtattgagtcaccgatccgttttgcgtgccgcatacgatccgtaatgcgtcatgatgaaccgcgagctgtgccaacgcttttctcatagcagattcattgattctgtccgcactgcggagcattacggactgattaaaatgatcatgcggcaatgattgcgacaagaaccagtgctggatcggcgtcagcggcacgtctcccgtgacgggagcctgatcaatcacgcggcggactttccggagccgcatcgatacttctcccagtgtctgatgctcgaacagctcgcggacggtcgtttcatagccctgctgtttcagcctcgcacatacttgcagcgctttaatcgaatccccgccgagatggaagaaatgagcattggggccgaggccttcaacacctaagagttcttcccaaatgtcagccatcatttcttcagtttcatttctcaggctgatatcatctccaaggctatcatttaattcaggctgcgggagcgccttctcgtccagcttcccattcgccgtcagaggcagttcatcaagctctatcaagcgggcgggaatcatatattccggcagaaaagctctgagagaggcctgaatctctgcttcttttatcttttcgttcccgtgtaagaccgcgtatgcgtaaatggagtgctgaccgtgctgatcagcacgtgtgatcacggcggcctctttcacggaggaaagctcttgcagcgctgatttaatttctcccagctcaattctgtggcctctgacttttacttgcgcatctttccgcccgacatattccagctctccatttgagagtcttttggcgatatcacccgtccggtagagccgcatgccggaaacgtgcggattcgtgatgaaacgggaggcggttaaatcatccctgtttacatatcccctcgcgacgccttccccgccgatataaagctcaccgggaattccgatcggctgcggattcatataggcgtccataacaaaagcatgaagggtttccagcggtctgccgatattgcttttgtttctctcaatatcatccatattcagttttttgcatgtgacgtgaaccgtggtttccgtaataccgtacatattaacaagctccgtctccgggtacttctctttccagcttttcagcatgccgggctgaagcgcttctccgccgaaaatgacatatcgaagcttcagcttgtccgtatgcccggcctcttcatgaatgagtccggaaaaagccgtcggcgtttggttcagcaccgttacgccttcactttgcagcagctgccggtacaaatacggatcacgggctgtgtctttcggcacgataactacctttccgccgtataagagcgcgccgaatatttcccagacagaaaaatcaaagcaataggaatggaacagcgtccagacgtcttcagagccgaaatcaaacggcagtcctttatgtgtgataagactgatgacattgcggtgttccgtcataacgcctttcggttttccggttgtgcccgatgtgtaaatcacgtaagccggctgttcaggcgttattatttctttcgttctgtctgctgaaacggattcaggcttatcgatgtataaaaccggcagcccgtccattccggatatcccaagacccgattgcgtcaacagagcacgcgcgccgctgtcagtcagcataaatgaaatccgctcgtccggatagtcaggatcaatcggcagataagcacctcccgcttttaaaataccgagaatcccaatcagcatatccggagatcgttcggtcataattccgacaatctgtccggagcggatgccgttttccgacagcatatcggcgattcgatccgccttttcattgagctcgcggtaggtgagacgctcatcagacatgacggctgcaatttgatccggcattttttccgcctgtgcttcaaataaactgacaatcgtttcatgcctcggatactccgccgtttgattttccgcttgaagaagcatctgccgctcgtttatgcccagcaaatgaatgtcagacagcttccgctcatcatccgatgcgatttgtcctaaaagctctttaaaatgaccggcccaccgttcgatcgtatccttttcaaacaacgcggtactgtattcaaaatgaaaatccagtgagccatccggccgttcctcggcatgaagcgtcaagtcgaattttgaaatgtcatgcttcactgcatgtgaagaaacggataagcccggaaggttcacttcgaaatcatcactgttttgcaaaacgagcatggcatcaaacagcggattgcgattgacttcccggtgtgtatcaagcttttgggcaagttcttcaaacgggaagtcctgatgttcggccgcgccgagggcgagcattttcacctcttctaaataagcgcggaatgtcttatcccctttcggcctgcttctcattgccacggtatttacaaacatgccgatgaccccgtcaagctcagcgcggcttctgccggccgcaggtgaaccgacgacaatgtcttcctgcccgctcaatttagaaaggaacaaggagtagcttgccaaaagaatcatatacagtgtcgaacccgtctcatccatgagctggcgcaagttctccgccgtttccttttgaaggcgcgttcgaaccgcggacccgctgaaatcaggaagctgcgggcgctttttatcgagcggcagatcaagtacgggaatgttttccccgatcgtctccagccaataacgctcatgtcttttgaattcttcagcggcaaaccgctcatgctgccagacggaaaaatctttgtactggagttttaacggccgcaactcttttcctctgtacaaatccgtcaattcttgaatcagaacgctcattgacacaccgtctgcgataagatgatgcatatcaagcagcagaaaatgacgttcttcagtaactttggctaaagtcactctcaaaagcggcgctttttccacgtcaaacggtttgacgaaagtttccatcacctcttgaagaaggttcccggatggcatgtgaatctctgtgaggtcaagatcgacatgtgcatgtatttgctgcatcggctccccgtttcgtaaaacaaatgaagtgcgtaacgcttcatgcctttgtaacagcgctgaaaaggcttcgtgcaggcgatcccggttgagtctgccgctcagttccagacaagcgggcatatgatagcccgtactgtccgctgcaagctgatgaagggcatagagccttttttgcgcaaaagatagcgggtacaagtcctttgccacagcaggcgtgatttctgcatattctcctcttttcctctgttcaaggaagcgggccatgctctcgatggtcggatgttcaaaaacatggcggacggcaagttcaatttgcagccgtttatgtatgtttgaaacaagcgacgcggctttcagcgactgtccgccgatttggaagaaatcatctctcatactgatgtgttcccgtttcagcacttcttgccaaatagacagcagctcagtctcaagcattgtgcgcggagcttgataatcaccggttctctcggcttctttcggctcaggaagtgcggcccgatcaagttttccgctcacagacagcggcatttccgttaatttggtaaagcttcccggtatcatataagcaggtaatctcccggccaattcagcgtgcggtttaaatgtcacacccgcattttccagtacgacataagctgcaagctcctgttccccgtccgccattttgcgcacggtgactgccgcctcttttaccccggacagacttctgagtgccgtttcgatttctcctaattcaattctgtaacctcttaccttcacctgatcgtcaaagcgtcccatgtattcaatcgttccatccggtaaaaatcgggctgcatctcccgttctgtaaagccgttcaccttcacgaaacggatgaggggtaaagactttgtccgtcagctctttttgctgaaaatatccgtccgccagaccttttccggaaatacacagttcaccgacggctccgaccggctgcagccgatctccgtgcatcatatagacagaagtgttggcaatcgggcgcccgatcgtaatccggctgcttttttgcaggttgcgcagaatcgtcgtggccacactgttttccgtcgggccgtattcattcagcagctcggcattcgggcatatgccgcggctcgcttccacgatatcaggagtggccgcttccccggcaaatgtcaccacccgaagcgtctgcgcatcctttttcgtcagcgaatcaagcagaacgcgatacagagacggaacgatcagaagatggctcactccgtgtcgggtgattttctgttttattgaaaggacgtctttcgcatcatcttcatcagttaacaatacacaggcgcccgacagaagcggagtgaaaagactcgttaatgacccgtcaaatacgtatgaaaaaagatgaagcgctatgtccccttctgtcatcccgtattcttcacgccgccattgcaatgtattgctgatcgctttgtgttgtacaagcacccctttcggccggcctgtcgttccggaggtgtaaatgacatacgcccaatttccgctgtcagataccggcggaagcggtgaagtctgctgggaaaccgtttcctccatgatgacgacgctgcccttgaaatgcggcggaatgagggggagcaggtctttttcagtcacgagcagtgaggcttcactgtctctcagtaaaaatgaaatccgttcaggcgggaattccgcatcaatcggcatataggcgctgcccgacttccaaattccgagcagagcggcaaccgtactcattgatcggcgcagcataacagcggtgatctggtcggggcgtgcgcctttttcccttaacgcatgcgcaatctgattcgcccgctgatttaatttcttgtagctccagcttaccccgttatatctcaacgcctcttggtcaggcgtttttgccgcctgttcttcaaacagcccatgaacggttgtctcagggtacggacggttcgtttcgttaaacgaatgaatcaaggcttcttcctctggaggcacgagactgatgcttgataaaagcctgtccggatcttccgttacacaggagatgacctccagaatatgccctttgatccgtttcatgtcttcccgatcgtagatgcccgcattgtagctgaatttcacataaaactcttctcccggaacgatgacgacgttaagatcgtaattggtttcttccgccatcgaaaagttttcaagtgagagcgcactgctttccgtttgcttccagccgtttaccgcagtctgcatctgaaccggataattctcaaaaaccaggatgtggttcaagagatcttgttgcaggccgctctcgttttggatgtcataaagcggataatagctgtgctcttccgcagcgagtgactctttctgcacctttttgagaagagaagaaaaagtcatatcccgagccgcgcgcacccttatcggcacggtattgataaacagtccggccatggattcgatgccggcgatagctgacggcctgccggaaacaactgaaccgaataccgcatcttcagtgccgttgtaacggtggagaagcagtccccaaatgctcgtaaataaagtattcagcgtgaccccggtgcttcgggcaatgtctgtcagcttttgcacggtttcagactcaagggaaaattgaaaatgctcagatgcataaccgttttgcgccggcttattcttcgtttgcggaacggaaacgacttctccgtaatcttccaagcagcgcgaccagaacgctgacgtttcttctttattccggcttcggagccatttgatataagaactgtaaggagccggactgctgaggtttacaggccgcccgtttcggatcgcataatacatgctgaagaaatctttcagcacaatgcccaagctccagccgtccatcataatgtgatggtgagtccaaacgcatgtatggcggttttctcccgtttgaaaaagagtcaggcgcattaaggggcctttttgcagatcaaagcccttattccggtcggtttccttgaattccttaatgatgttttgctgctgttcttccgaataatctgaaatgttctcagtctgtacggctgtgtcacggcgtgaaaggacaacctgctgcggcccttcaaggtcaggcacttcttttatgaaaatcgttctgaaaatatcataacggctgacaagcatatccagacttttttggaatgtatcaatgcataaatccccgctgactgtaaacgaaatctgctcgacatatgcgtttgatccggaatccagaagcgaatgaaacagcatgccttcctgcatatatgataaagggtaaatatcttgaatttctgtcgcttgtgtcacgaatgccacacacctttttatgaaattaaagtccttttacgagatcttcaatgcttgatagtgcttgagcggtcaattctgtatggctgtaatccgttaatgttttttcccgctctttcttgccggaacagtgggcgatgatgtcctcgatgtgagtatggaaacgattcatgaagaactcgattgcccccggtgcaaatacatcggtataaacggcttttacctccagttgcccggccgccaccatcgcgttaatatccagatcaaactcgcggatgcgcccggccgctatatcatgctgcggcttgaacggtgacatcttcagcgttccctcaagaccgtcaaacgcaccgagatagttaaagcttatttctgggtctttataaagaatgtttcgcgaatatctcaacagcccgtagccggttccgtgataaggaacccgtctcatcatgtcttttaccgtctttatgcggtgagcggttttttcgcctgagccgcccggcactctcatatccaaaagcaccgggtaaacagatgtaaaccatcctgctgttcttgacatatcaatgtcaggcatatgcccttggcgcccgtgcccttcagtgctgataaggatctgttcagaacccgtccactcatgaagcgccattccaagcgccgttaaaagcaattcatgaacatccgttccgtatgcctgctgtgtttccaacagcagctgtttcgtgacttcgctgcttaatatccacgatgccgtgcgcgcgttttcctgcaatcgtccggcgttttcatcagttattttcggcagcggcgctgtttcactagacatcacgctgtcccagtatgcggcttcctccagcaatgctttgcttttggaaatgtcaaaaagctcttcggcatactttatataagaatcgcttttcggcggcagtttgatttgtttgccttccaatgcctgctgataagctgtctgcagatcttcaagcaatatcctccatgacacgccgtccacgataagatgatgaatcgttataagaagatggtcggcttccttctgccggaacactccgagatgaagcagaggcccttgatcaagacgcatagcctgctgtatttctttttcctcagcggctatccgtttttcgggctgcgtttcttctgaaatatctatgacgttaagcgtaaagatttcttcatactgctttgtgattccgcgattatattgaaccgtttccccatgctcattttcagtgaaagtcattcgcagcgcatcatgatgttctgtcagcgcgcaaaccgcctgatacagcgcatctatttcgaggctgtcttcactgcacagcatgaccgcttggttataatgaagctcaaacgcacccggctcctcaaaaaatctctgctggatcggtgtcagcggagcgcttccttctatcggcccctgatcagccgttgcaacagccggcatgaggtgcttcgcgagttctgcaatcgtcgggaactgaaacaaatcgcggatcgacatgttccagccttctcccgcgagtcgggctgacacttgaagcgccttaatggaatctcccccaagctcaaagaaagagtgatgaattcccgctttctgaacatgaagcacatcttcccaaatccggcataacatctcctgtttttcatcgccgggcgcgacaaatgcctgtgttgaatgtatctcttctgccggcagtgccgatttgtcaagtttgccgttcagtgtcaggggcatgctgtctaaaccgataatatgagacggcatcatataagccgggagctcctgcataagagactggcgaagtgatgagatatcggcctctttaggaacgatgtatgccgctaatcgggcttgtccttcagcatctttcatcacggtaacagccgcttctttgacttgatcgtgtttcaaaagcacactttcaatttctcccgtctcaattctgtagcctctgatttttacctgcttatcaatccgcccttgaaaacgaagagtaccatccggcagccagcaagcctgatctccggttctgtaaagcgtttctcccgtttgtaacgggtcactgaatgcgtcctctgtcagctcaggctgtccccaatatccttttgcgacgccggcgcccccgatatacagctctccgaaaacgccgatcggctggatctgtttgtctttgtttaagacgtacatttgcacattcggaagcggaacaccgatcggcacatcatcttcccgcggctcttcgctcatttcggcttcataatacgaagaatcaattgtcgcttctgttacaccgtagctgttaatgatccgcatttcttttccgaagcgttcatgaagcgtataaaaatcctgcgacttgatcatatctgaacccagtacaagtatttttacactttgcagcgcgagcttccggcgatatatatattccataaacggaactaccagcgcgggtgtcgactccataaacgtgatacggtgctgatcaatgagccgataaagctgttgtggctcaagccggacgtcatccggacaaatgacaagcgttcccccgtttagcagggcacgtgcaagatcccctgaaaatacatcaaatgagaaactcgccatctgcagcactcggactggtttacgatcaagctcataaattttccgccatgcaagtgctgcatgcgtaaagctgagatttctgacttcgactcccttcggcgttcccgttgttcccgaagtatatatgatatatgcagtatcatccggtgacgctgccggctgaatattctttgcacaaatatcgtattgatcttcatgatcgagctgaatgagaaataaattgttatccgtcagctgtgaagcaagttctttgtattctgactgcaccatcaagacggatgccgcgctgtcttttaataaatagcgaatccgttcctcgggataatgggagtcaaccggtatatacgcccctcccgatttcatgacggcaagaacactgacgatcgcttcaatcgagcggtttgccaatatagctgctctttttcccggaccgaatccatttttgtgtaatgttcgcgcaagccgatttgcccgctcattaagctgcgaatagctgatctgttgtgctccttcaataacagcggtctgatgaggcgtttcttctgctttctcttcaaacagctggtgaaacagtttgtgtttttccatgaattcggtttgtgtgttattaaactcaatcagtaacttttgtttttcttcttcatccaaaatgtcagctttcgatagtgtgacttccggttcggcggcaacatggcgcaagagattcagtaagtggcccatccagcgttcaatcgtttctttcttaaaaagctcggtgctgaattccatttcaaagcggatgtttccatcggattcagccgctgataaggtcaggtcaaaacttgatacatcatgttcggtatgctctgatcgtgacgccttcagaccggccagatttatttcctctcgctccatattctgaagaataaacatcgcatcaaacagcggattgcggctcatgtcccgctgcaccccgagccgttccactagctcttcaaacggatagtcctgatgctcatatgcctcaagcgcggcctggcggacttccgccaagtaatcggtaaaccgtttgtctcctttcggctccgttctgatggcgagcgtgttgacgaacatgccgagaatcggttcaaggtctttgtgcggacgcccggcaatcggcgagccgacgatgatgtcttcctgcccgctcaatctcgcgagtaacgtattgtacgcggcgagaagcaccatatacaaagtggagccgtgatcccgggcgattcggtgaaggccggatgccgtttcagcgtcaagcgtgcacgatacgctgccgcccgcaaagcttctgacagccggacggggcttgtcagccggaagctcaagcaccggaagctctccttctagccgcttcagccagtaggcttcctgcttctggtacccttctttctcctgaaacgaccgctgccagacggcatagtctttatattgaaggcgcattggcgcaagcgaacggcctgcgtacagctcgccgaattctttaatcaaggtgttgacggacacaccgtcagaaataatatgatgcatatccgttaataaaagatgacgttcgtccgattctttcacgagggccgcacggaagagcggcgcttcctccagacaaaacggccggacgaatgcgtcagctgacccggcctcatccagctgaaacggtacgctgtcatggatgcgctgcaccggttcgccgtcaggccccgtttcaaaggacgttctgagcgactcatgccgctccacaagctgccggaacgtctcctccagccggccgcggtcaagcggacccgtcagttccagcacagccggcatattgtagccgacaccgccgtcttcaagctgctggagcacatacatccgtttctgcgccgaagacaaagggtaggtgtcctgtgtttgcgcaggctgaatcgcttcatacgggctctcttccaagtcctgaataaccgaagcaagctcttccaccgtcggccgggcgaagatgtcctgtaacggcacctgaacaccgaattctttggcgatgcgggagacgagagctgtcgcttttaacgaatggccgccccgctcaaaaaagtgatcccggatgccgacggggccgtttttcagcacctcttcccaaagggcgcaaagcttcatttccgtgacgttccgcggggcggtgtacgcctgtctgtctgccgctccgccgggagccggcagcgcgcggcggtcaagttttccgctcggcgtgaccggccattcgctcatctctataaactgagccggcatcatgtaggccggaaggcgtgtcgcaagctccgcccgcacgtcatcgctttcccgtccttcgatataggcgtaaagcgcggtttcgccgtgttcgttccgggcggtgaccgccgcctcacgaatgccgtcgatgcgccggatcgccgcttcgatctctcccggttcaatccggtagccgcggactttcacctgtccgtctgaacgtccgagccattcgactaggccgtcttctgtccagcgtgcgatatcgcccgtctgatacatgcgttctcccgggtaaaacggatcatcgagaaaacgctcctgatcgccgtcgccgagaatataaactctcgtattggcaatcgcccgtccgatcgaaagcgatccttcctccggattgatgacgccgcttgtcgcgacgacggtgttttccgtcgggccgtagttgttgacgatcgtgtacggctgtttcaccgcccgcttcagcttgtcgccgccgacgagaagcatgcggagagaggtattttccagctccataaattgttcggccagctgcgtcggcaggaaggtgatggtcacgccgtgctcttcgaaatagtgatttaagcgggtgatatccagccggatcgcttcgtcaatgacatgaagctccgcgccgatggtccatgtcgggaacatctcccagatggaggcgtcaaaaccgaagcccgcgtatttggcgcttttatcatccgccgtcatggcgaatgcgtcgtgatgccagaagcacaggttcaccagcgcatggtgttcgaccatgacacccttcggctgtccggtcgttcctgacgtgtaaatcatataagcgagatgatccgccgttgtttccgtctgcgggttcgcttcatcgttttcatcaagcggcaggctcagaatggagcggctgccgtcaagcagaatcgtttctccgttgtagctttccggcacgtcgagcgcttcctgtgtgagaagaagcttggcgccgctgtcctgcagaatgtagctgatgcgctcttccgggtagtcggggtcaatcggcacaaatgccgcgcctgctttcaggacgccgagtacgcccgcggccatttccaaggacggtttcgtcaaaatgccgacacgttcgtcagccgtgacgccgcagtccatgagaatgcgcgcgatccggttcgcccttgcgttcagctcgccgtacgtccatttcgcgccgttgtatgccgcggccggccggttcgcgtagcgggcggccgtttcttcaaagagacggtgaaccgttttgtcccgcggcacagaaattgtttttcctttccatgcgttgaggagggcttgtttttcagcatcgctgatcagtgaaatctcaggcagctttctgtccggactttctgccgcttgcttcagaatccgcaggaacccggcgctccacttttcaattgtttcttttttaaacagatcagtcgcatattcaaactgaaggccgagaccttcttgatccgtaaagccgccgagtgtcagatcgaatttcgccgtgccttggtttgactcatacggagtgatgcgcaggttctccagttccagtgtttctttatccggatcttctgtcgtcaccatcacctggaacaatgggttacggctcatatctctcggcaggtcaagctttccgatcagatcttcaaacggataatcctgatgcgccagcgcgtcgagattggtttgtttcacccgttcgagcaacccggcgaaggtctgctcttttcgcgtttcattgcgaagcgcaagcgtattgacaaacatccccggcatttcctgaacttcggcgctcgttcttccggcggtcaccgagccgataatgatatcgcgctgccccgtgattttgctcaaaaagacatggaacgcggcgtgaagcaccatatgaagagtcgctcccgatgattccattaattcacgcaccgctttttccgtttcacgccccgctctgaaacggacggattgtcctttaaaactttgaaccggcggacgggggaaatcggtcggcagattcaattcaggaagctcgccggaaaatgcggagagccaataacgctcatggtctttcatccgttcggcctgctcgggttcattctgccagacggcgaagtctttatagtgcaggttcggcgacggcaggcttccgcctttgtaaagatgagcgagctctttgaccagcatgcttctggacacgccgtcggcaataatatgatgcatatccagcagcagcaggtgtttcttttcattcagtctgacaagagcggcccgaatgagcggagccgcactcagatcgaacggcttaatgaatgcctgaatgataagatccgctttctcctcgtctgctgcttcaaagatgtgcaggtcgatgtcagcctgttctgcgatctgctgcatcgggcggccgttttgatcgataaaggacgtccgcaaagactcgtggcgattgatcatctgattgagcgcttcctgaagccttgaaatattgacttctccttccatcagaagaacggacggcatattataactgattgtctcccggtcaagctggttcaggacgtacatccgtttttgggcggatgataacgggtacgcgtctgcactgtcggccggtgagatcatccgatatccctcagataccgctgatttttcgatatatgcggcaagcaggcggacagtcggctgttcgaacagcgcttttaacggaaccgttttgtccagttcagcctgaatattggcgaggagcatcatgccttttaaagagtgcccgccgtaatcgaagaaattatcgtcgatgccgagcgtatccgtaccgagtgtctgtttccaaatgcggcacagcttttcctccaattccgtttccggcaaggctgaaactgtttgcgccgtttggctgacgcccggtttcggaagggcgtttttatcggtttttccgttggctgtgagcggaatgcggtctacttgcatgaaataagccggaagcatatgagacggcagtgtttcggaaagccgtttgcgaagctcagagcctttcagctcgctgtcggctttataatacgcgcacagttccggcagcccgccttcgctgactgcgagaacgaccgcctcctgaatgccgtttacgcttaacagcacagtttcaacctcttttaattcaatgcggtagccccggattttcacctgatcatccgcacggccaataaattcaatcggcccgtcaggaagcctgcggacgacatctcccgttttgtacatcaggctgtccggtgaaaaaggatttgagagaaatttctccgccgtcagctgcggacggtgaagatatccccttgcaagccccttcccggcaatataaagctcgccgcttgcgcccggaggaacgagctgcattgctccgtccaatacaagcgcgccggtatttgcgatcgggcggccgatgacgggacgctgttcatattgatcaaggcgctccatattgatccgtccggcaatggcgccgatcgtcgtttccgtcggcccgtagtgattgatgaagtcggtatgggcgtatacgtcatgaaacttgcggacatcggacgtgatgatcttttctccgccgagcaccactaaacgaagcgggctgaaacggcgttctgacgtaaaacgggctgtattgacgatcatatggaacaatgacggcgtcagtttcatatacgtaatgccgtttttctgtatatactcaccaagctgatcaggcgcggtgtacgtctctttcggcacaatgtgcagctcgccgcccgcctgaagaatcgggaatatggccgtatagccgagatcaaatgcgtaagaagacagcagcacagatttgtcagcttcggtcaaaccggcttcacggctgaaccatgtgacataattgattagattgcggtgctccagctggacgcctttcggtttgcccgttgttcccgaggtataaatgatatatgcaagctggtcggcgccgggctccgtttcaagccggccggcgctttcgttctgccattctccgtcttccattacgaccgtttttcctttataaacggcggccgcggtcatgtttctttcattgacgaccagaagcttcgttccgctgtcttcaagagagtagcggattctctcttcaggagtctccggatcaatcgggagaaatgccgctccggctttcatgacgccgagaatcgcggtaatcaagtcggccgaacgatccatcataatggctacgatgtcctcactgcccgttccgcaagcctgaaggtggcgggcaaaccggttcgagcgttcatcaagctcacgatatgtcagacttattccgcccgcaaccgccgtgagatcaggcgttttttgcgcttgccgttcaaacagcgaaacaaaagtgccctcaggcagatccgcttccgtacgtttttcatcagaaaggagcgcttcccgttcaggagcggacagcaggcttgcgtcggccagctgaatatccggattgtcagcgcaggctttaatcagattgacaaaatgagcgctccagcggcggatggtttcatccgcaaataaggctttcgcgtaatcaaagctcaatccgacctcttctccgcgttcagccgcttctaaggaaagatcaaatttagcgacatgatgatgcatggagtaagaagaaatctccaaatctccgagccgcagagccgggatctccatgttctgcatattaaataacacgctgaacagcggactccggcttgtgtccctcgttaacggcagtttttcaattaattcttcaagcggatagctttgatgctcaaaagcttgaaggctcgctgttttcacctcatccagaaattgtttgaacgtttttttgccggcaggatgcgaccgaagcgcaactgtgttgacaaacatgcccggcacgtcttggagatcaggatgctgtcttccggccgccggagacccgactatgatgtcttcctgccccgaatatttggacagcagcacttgaaaagcggctaacaagaacatgtacatcgtcgtatctgtatcagccagcagcttcttaatctgcgccgtcacctgtttatcaagcccgaagatgacgcgttccccttcaaaactgcgctcggcaggacgcgggaaatcaagcggcagatccagcaccggcagatcgcctttgaacgtatcaagccagtaggcttcgtgctggtcgagatttgctttttcacgctgccagactgaaaaatccttataatgaatctttggcagcgcaagctccgtgccttgataaagcttcgcaagatcaccgatgaaaatgcccattgagcttccgtccgtaataatgtggtgcatgtcaatcagcagaagatgccggtcttcttcaagccggatcagcttcgaacggacaagcggcgcgcggttgagcgcaaacggcctgataaaggcttttgtcagctcttctgcatcttcttcccggccctcggcggtttcaagctcaaacgacacatttttgtgaatggtctgcacgacttctccatctgccatgtcaaacgacgtacgcaaggtctcatgacggttgattaaagcctgcatggcctcctcaagacgctttttgtctactgacccttccagcaaaagtacagcagggacgttgtagctcgtgctggcctgtccgagctgattaaggatatacatcctgcgctgtgctgaggaaacaggataatgcttctgataaggcgcttgtcggatcggttcaaactgctgctcctcctcgctctcatgctgcaaataatgcgcaagctcctgaatggtcggcttttcaaataacactttaatcggtacttctttttgaaagtgctcctggattttagcggtcatcatcatggcttttaaagaatgtccgccaatcgtgaagaaattgtcagtcacacccgcttttacaccgagaatgccttcccaaatgtcagcgagtttctgctccgcttccgttttcggcgctacgtattctttttgaacggcttcagcctgaggctcaggtagcgcttttttatcaatttttccgttcgccgtcagcggaaactgattcatctggatgaagtgcgcgggaatcatatattccggaagtgattccgaaagcgttttgcgcaggtcttccggcgaaagagcttggtctgccgtaaagtaagcgcagatttcattttcatccgctttatttttccggatcacagccgcagattccgtcacattctccgcctggctgattttcgcctcgatttcgccgagctcgattctgaaaccgcggacctttacttggttgtcaattctgccgagaaactcgatcgtgccgtccggaagccacttcgccaaatcccccgtccggtatatcatttcatccggtctgaacggatcgcggacaaactgcttctccgttaattcaggcaggttcacatagcctcttgccactccgcttccgccgacgcacagctcaccgggcgcgccgatcggctggaggttgcggttttcatccataatgtacgcagtggaatttccgatcggcttcccgatcgggaccgaaccgtcataatcctgatcaatgagaaaactcgtcgaaaacgtcgtattctccgtcggcccgtatccgttccaaagcgacagctccggtgatgcctttctcactttgctgacaatatgcggcacaagcgcatcaccgccgatgatgaggtgccggagcgtgttaaacatgccggcatccttttgggcaagctgattaaacagcggagacgtcagccacatggtcgtgatccgctgctctttcagaaattgggcgaattgtccggcgtcaagcagcgtctcttttttcaccgggtgcaatgacgctccgttcagcaatgcgccgaagacttcgaaggttccggcatcaaagctgacggctcccgtttgcgccatccggtcttcttcatgaaccggcacgtaattcgaatgtttgacgagcctgatgatatttctgtgttcaatcatgacgcctttcggtttgccggtcgatccggatgtatacatgatatacgccaagtcgttgccaccggccggaagattcaagtctgttccgcttaccgtttcatccgcgctttcatccagcatgacgaccgggacttgcaatgcacccgcttgttcttgatagtcctgaactgtcagcacgagccgaatcgagctgtcttccgccataaagcggagacggtcctccggaaaagacggatcaatcggcacatatgcgccgcctgcttttaggacggcaagcattccgacaacggtttccgcagaccggtcgttcataatagcagcggtccggcctttttccagcccgctcttcacaaggtgtctcgccaggcggttggccgcttcgttcacttcacggtaggtccattcgcgtcccgcttcttttatcgcgatgcttgcaggcgtccggtttgcctgtgcttcaaacaaacggtgaacggcctcctcttccggaagcaccgttttcgtatcattgaatatctcaacaatctgccgctcttcttcgcctgaaacaaggccgagttcccgcacgggcgcgtcaggcgttccgaccgcggctttcatcatgcgggtcagatggtgcgccgttcgttcgatggcatcatgagcgaaagccgctccgttgtatttgattttgacagtccacgtttttcccggatacacgatgagattgaaatcaaagctcgtctgctcaaaagcatgttcaactttaatggaaaagccgagtctttcctccatgcccccgttttccagctctttgtccagcggatagttttcaaacgcgaccaaatgatttaagaggctgccgtccagggcggagcgcttttgaatgtcatagagcggcacataatcatagcgctcggcttccacggcgtttttctgaactgccgccatcacgtccgaaaaggctgcatctttgtcaatcttgattctgacgggaattgtattgatgaacagccccgccatcgtttctatgccgttgatttctgaaggacggcctgatacgacggtgccgaacaccacatcgtctgtatagttgtatttgctgagcaccgcaccccaaacggcctgaaacaggttaggccccgtgacttgatgccggttggcggtctgctgaatctgcgcgaccagctcttcatcccagacaaaagaatattcttcattttggtagtctttcttttctgctgccagacggcccgggagcaggctcggctgttcgaaatccgccaggcggctgctccaatattgttccgcctcctcataatcccggcctccgagccatttgatatagtcagagtaaggtttgccctggcttcccccggcgggccggccggcacgaagcgcttcatagttttggaacaggcttttcatcaaaacgcccatactccagccgtccatgacgatatgatgattgctccagacgagatacagctccttctcactgagtctgaacaccgccgctttaaagagaatatctttcgccagatgaaagccctgctgctgcacgccgcgtttatagcgttcaatatattcggtttggcgcgattcatctaattgactgatatcttcatagtgcaccttcgtcttccgctccgccaatacgacttggcgcggtttttgaagctgctggtgcacgaataccgtacgcaaaatgtcatatgtccggatcagctcattgacgcttttttcaaaaagctccagctgaaagcttccgtgaatcctaagctctaattgtgtgaagtaggaggaagaatgcggatcaagcagcgcatgatacagcattccctcctgcatcggtgtgagtgcatacaccttttgaatcgattttttgctcatatgtcacctctgtcttttctgttagagaatttccattaatttatcaagttcatcaagcgtcagatcatcatcgccaagatcgctaggcgtaagctcaggtccgtcttgggccaggcagtgatctatgattttcaagaggtgccctttaaaactgtcactgaacgattgaatggttttttcatgaaattcgagagaatgataggcaaacgtcatcgtcatctgcccattttctataaatccgacaatatcaagcgcattcggcttctctgtgtcagggctcagcgattgtcctgacggcatcccggatcttgtaaataagccggaatccgacatctcattaaactggcctaagtagttaaagctgatatccggatcaatctcaaatgaaagattctctttatgctcaggcgccgttacataacgcagaatgccgtagccgactcctttgttcgggatgtgtctgatgtcttctttcatttgtttcagctgatatgaaagatcgtcggcgtgcttcatctcaaggatcatcggatacatgctcgtaaaccatccgaccgtccgggtgatattcaggccgtcaagaatgtcttcgcgcccgtggccttccaaatgaacgccgatcgtgtcttcacccgtccactctttcagcgccagtccgagcgccgtgagcaggatgtcgttcatttcggtgtgataggcttcatgtacgtttgtcgtcagctgttcagtttgttcaggcgtcagagagaagctgaccgttctcgtatgtctcatgcgctgatcaccagactgcctgtctttcggaagctgagtgcatacctctttttcctcaagctctctccagtaatccgcttctttcagaaacgccttcgtatttgcgtattctttgattctctcggcaaattcggcgaatgaatgtgttttcggcggcagcgcgggttcattgccttgcttcagctgcgtataaacggacgtaaagtcctccagtaaaatccgccaagatacaccatccacgactaagtgatggattgcgagaagaaggtggtctccatcttcagcccggaagagcccggctttcaagagatgtcctgtttccagtgaaatactgctttgaagacggtctgcttccctttcgatacggtcctcatggtcttcagcaggtccgttcagctcaaagacgttcagttcaacagacgcatcctcaagccctctgtaatacggtttttgttcacgataaatcatccggagcgcatcatggtgaaccgtcaggacatgtaatgttttttctgttatctccggatcaaagccgtctttcgcgtgaagcatgacggattggttccagtgatgtttgtcggtaaagtttcgttcaaagaaccagcgctggatcggcgttaagtccgcttcgccttcgacagggccttggtcggcctgcttgccttccgtccgctccacgtaggagacgagctcttcgatggtcggatgctggaagaggtctttcatctccagcttgtagccgtgctggttcagacggctcgccatttggatgcctttgatcgagtccccgccgagtgtgaagaaattatcgcttacgccgatctggtcaagaccgagcacttcctgccaaatgtcggaaagcagcgtctccatctccgtttccggcgctttgtacgcggcgcttcccgcttcaatatccggttccggcagggcttttttgtcaatctttccgttcgcggtgaccggaagctcgtccatctccacccagaaagccggcaccatgtagtcaggcagcgtgtctttcagcgcggatttgagcgtttcgatatcgtcctgctgaggcgcgacataggcgcaaagcgcggtattgcccgctttgtcttccacggccgtcaccgctgcgtcatgaacgtccgcaagctgggcgaggcggacttcgatttctgaaagctcgatccggtagccccgcactttgacctgctggtcaatacggccgatgtattcgatgccgcactgcgcgttccatttgacgaggtcgccggtccggtacatgcgctcgcccggcacgaacggatctgcggtaaaccgcttcgccgtttcttcttcacggttcaggtatccgcgcgccagaccgcggccggccacacacaattcaccggcaatgccttccggctgcacctgatcgccgtcgccgagaatataaactctcgtattggcaatcgcccgtccgatcgaaagcgatccttcctccggattgatgacgccgcttgtcgcgacgacggtgttttccgtcgggccgtagttgttgacgatcgtgtacggctgtttcaccgcccgcttcagcttgtcgccgccgacgagaagcatgcggagagaggtatccaatgaccctccccggttgagccgggggctttcacatcagacttaagaaaccgcctgcgagccctttacgcccaataattccggacaacgcttgccacctacgtattaccgcggctgctggcacgtagttagccgtggctttctggttaggtaccgtcaaggtgccgccctatttgaacggcacttgttcttccctaacaacagagctttacgatccgaaaaccttcatcactcacgcggcgttgctccgtcagactttcgtccattgcggaagattccctactgctgcctcccgtaggagtctgggccgtgtctcagtcccagtgtggccgatcaccctctcaggtcggctacgcatcgtcgccttggtgagccgttacctcaccaactagctaatgcgccgcgggtccatctgtaagtggtagccgaagccaccttttatgtctgaaccatgcggttcagacaaccatccggtattagccccggtttcccggagttatcccagtcttacaggcaggttacccacgtgttactcacccgtccgccgctaacatcagggagcaagctcccatctgtccgctcgacttgcatgtattaggcacgccgccagcgttcgtcctgagccaggatcaaactctccgataaagtagtttgactgactacgtacatcgctgtgcgatttatttaaaactttgaattaacaggtacgttttgtcttgtttagttttcaaagatcattttgttcactttctcaagcaactttttaattatataataagtttctcttaaagtcaacatgttttttataaatggtggagcctagcgggatcgaaccgctgacctcctgcgtgcaaagcaggcgctctcccagctgagctaaggccccgaagtggtcgggaagacaggattcgaacctgcgaccccatggtcccaaaccatgtgctctaccaagctgagctacttcccgatttttaaaaatattatggcgcgcccgagaggagtcgaacccctaaccttttgatccgtagtcaaacgctctatccaattgagctacgggcgcataataatgaatgccgagggccggacttgaaccggcacggtagtcacctaccgcaggattttaagtcctgtgtgtctgccaattccaccaccccggcgcggatggtatagttggagcggaagacgggattcgaacccgcgacccccaccttggcaaggtggtgttctaccactgaactacttccgcatacaggataactatcctgcataatgcgggtgaagggacttgaacccccacgtcataagacactagatcctaagtctagcgcgtctgccaattccgccacacccgcgtaacatggtgagccatgaaggactcgaaccttcgaccctctgattaaaagtcagatgctctaccaactgagctaatggctctttttaaaagacttatgttattatcttgtccaaaaacagtgccggccagaggacttgaacccccaacctactgattacaagtcagttgctctaccaattgagctaggccggcaaatatggtggaggatgacgggctcgaaccgccgaccctctgcttgtaaggcagatgctctcccagctgagctaatcctccatatattacacttacgtgtaatggcttggcggcgtcctactctcacagggggaaacccccgactaccatcggcgctgaagagcttaacttccgtgttcggcatgggaacgggtgtgacctcttcgctatcgccaccaaaccattgagagtgttctctcaaaactagataacagtaagcatacattcaaattggttaagtcctcgatcgattagtatctgtcagctccatgtgtcgccacacttccacctcagacctatcaacctgatcatctttcagggatcttacttccttgcggaatgggaaatctcatcttgaggggggcttcatgcttagatgctttcagcacttatcccgtccgcacatagctacccagcgatgcccttggcagaacaactggtacaccagcggtgcgtccatcccggtcctctcgtactaaggacagctcctctcaaatttcctgcgcccgcgacggatagggaccgaactgtctcacgacgttctgaacccagctcgcgtaccgctttaatgggcgaacagcccaacccttgggaccgactacagccccaggatgcgatgagccgacatcgaggtgccaaacctccccgtcgatgtggactcttgggggagataagcctgttatcccctccacatcgacggggaggtttggcacctcgatgtcggctcatcgcatcctggggctgtagtcggtcccaagggttgggctgttcgcccattaaagcggtacgcgagctgggttcagaacgtcgtgagacagttcggtccctatccgtcgcgggcgcaggaaatttgagaggagctgtccttagtacgagaggaccgggatggacgcaccgctggtgtaccagttgttctgccaagggcatcgctgggtagctatgtgcggacgggataagtgctgaaagcatctaagcatgaagcccccctcaagatgagatttcccattccgcaaggaagtaagatccctgaaagatgatcaggttgataggtctgaggtggaagtgtggcgacacatggagctgacagatactaatcgatcgaggacttaaccaatttgaatgtatgcttactgttatctagttttgagagaacactctcaatggtttggtggcgatagcgaagaggtcacacccgttcccatgccgaacacggaagttaagctcttcagcgccgatggtagtcgggggtttccccctgtgagagtaggacgccgccaagcttttttattttatctaccatgtttttgtttatgaagcttataatattccgcagtagctcagtggtagagctatcggctgttaaccgatcggtcgtaggttcgagtcctacctgcggagccattgcttccatagctcagcaggtagagcacttccatggtaaggaagaggtcagcggttcgagcccgcttggaagcttatctaaatacgttgatctgaagcagtttccgcatgttatggaactgttatttttttatttggaacagtaaaaactgttactgattgcagcagttaaggtataggtgtttaaagcgcgctttctgatgaagttagccttgcttcaatgtttcaaagagattaacataattaattgttaaacggtattgacttttatcaaaaccttgatataattacttttgtcataatgagcagtatgtttagattgatcttagggttataccgtttggatttttactgaataaataataatacagtttaccgctatctgaggctgtattctggccatgctttacatttttacttgcggaagtagttcagtggtagaacatcaccttgccaaggtgggggtcgcgggttcgaatcccgtcttccgctccattttatcccaacgggatattgtgaaattgattgcgcccgtagctcaattggatagagcgtttgactacggatcaaaaggttaggggttcgactcctctcgggcgcgccataatatattttaaaatcgggaagtagctcagcttggtagagcacatggtttgggaccatggggtcgcaggttcgaatcctgtcttcccgaccattctcaaactttaaagataatatactggttttctttttttctcttttttttaaaaaatgcttgatttatagagagacaccgtggtatattattaaacgtcgctgatgaacagcagacaacaacaaaaagcttcggaaacaacttaaaaaaagttgttgacacaaaagaagctgagtggtaagataataaagctgcttcaacaagcggtaatgatctttgaaaactaaacaagacaaaacgtacctgttaattcaaagttttaaataaatcgcacagcgatgtgcgtagtcagtcaaactactttatcggagagtttgatcctggctcaggacgaacgctggcggcgtgcctaatacatgcaagtcgagcggacagatgggagcttgctccctgatgttagcggcggacgggtgagtaacacgtgggtaacctgcctgtaagactgggataactccgggaaaccggggctaataccggatggttgtttgaaccgcatggttcagacataaaaggtggcttcggctaccacttacagatggacccgcggcgcattagctagttggtgaggtaacggctcaccaaggcgacgatgcgtagccgacctgagagggtgatcggccacactgggactgagacacggcccagactcctacgggaggcagcagtagggaatcttccgcaatggacgaaagtctgacggagcaacgccgcgtgagtgatgaaggttttcggatcgtaaagctctgttgttagggaagaacaagtgccgttcaaatagggcggcaccttgacggtacctaaccagaaagccacggctaactacgtgccagcagccgcggtaatacgtaggtggcaagcgttgtccggaattattgggcgtaaagggctcgcaggcggtttcttaagtctgatgtgaaagcccccggctcaaccggggagggtcattggaaactggggaacttgagtgcagaagaggagagtggaattccacgtgtacatgccccttatgacctgggctacacacgtgctacaatggacagaacaaagggcagcgaaaccgcgaggttaagccaatcccacaaatctgttctcagttcggatcgcagtctgcaactcgactgcgtgaagctggaatcgctagtaatcgcggatcagcatgccgcggtgaatacgttcccgggccttgtacacaccgcccgtcacaccacgagagtttgtaacacccgaagtcggtgaggtaaccttttaggagccagccgccgaaggtgggacagatgattggggtgaagtcgtaacaaggtagccgtatcggaaggkgcggctggatcacctcctttctaaggattttaacggaatataagaccttgggtcttataaacagaacgttccctgtcttgtttagttttgaaggaactttgattctttcatatggtagatgggcctgtagctcagctggttagagcgcacgcctgataagcgtgaggtcggtggttcgagtccactcaggcccaccatctttacccaatacggggccttagctcagctgggagagcgcctgctttgcacgcaggaggtcagcggttcgatcccgctaggctccaccaacgtgttctttgaaaactagataacagaagtaattcacattcaattagtaatgcaagatatcacgtagtgattctttttaacggttaagttagaaagggcgcacggtggatgccttggcactaggagccgatgaaggacgggacgaacaccgatatgcttcggggagctgtaagcaagctttgatccggagatttccgaatggggaaacccaccactcgtaatggagtggtatccatatctgaatacataggatatgagaaggcagacccggggaactgaaacatctaagtacccggaggaagagaaagcaaatgcgattccctgagtagcggcgagcgaaacgggaccagcccaaaccaagaggcttgcctcttggggttgtaggacactctgtactaaggtagcgaaattccttgtcgggtaagttccgacccgcacgaaaggcgcaacgatctgggcactgtctcaacgagagactcggtgaaattatagtacctgtgaagatgcaggttacccgcgacaggacggaaagaccccgtggagctttactgcagcctgatattgaatgttggtacagcttgtacaggataggtaggagccttggaaaccggagcgccagcttcggtggaggcatcggtgggatactaccctggctgtattgaccttctaacccgccgcccttatcgggcggggagacagtgtcaggtgggcagtttgactggggcggtcgcctcctaaaaggkaacggaggcgcccaaaggttccctcagaatggttggaaatcattcgcagagkgtaaaggcacaagggagcttgactgcgagacctacaagtcgagcagggacgaaagtcgggcttagtgatccggtggttccgcatggaagggccatcgctcaacggataaaagctaccccggggataacaggcttatctcccccaagagtccacatcgacggggaggtttggcacctcgatgtcggctcatcgcatcctggggctgtagtcggtcccaagggttgggctgttcgcccattaaagcggtacgcgagctgggttcagaacgtcgtgagacagttcggtccctatccgtcgcgggcgcaggaaatttgagaggagctgtccttagtacgagaggaccgggatggacgcaccgctggtgtaccagttgttctgccaagggcatcgctgggtagctatgtgcggacgggataagtgctgaaagcatctaagcatgaagcccccctcaagatgagatttcccattccgcaaggaagtaagatccctgaaagatgatcaggttgataggtctgaggtggaagtgtggcgacacatggagctgacagatactaatcgatcgaggacttaaccaatttgaatgtatgcttactgttatctagttttgagagaacactctttaaaaaaactattgtcatattttcaaaagggtgttatattattaaacgtcgctgatgaacagcagacaacaacgaaaagcttcggaaacaacttgaaaaaagttgttgacataaaagaagctgagtggtaagataataaagctgcttcaacaagcggtaatgatctttgaaaactaaacaagacaaaacgtacctgttaattcaaagttttaaataaatcgcacagcgatgtgcgtagtcagtcaaacactttatcggagagtttgatcctggctcaggacgaacgctggcggcgtgcctaatacatgcaagtcgagcggacagatgggagcttgctccctgatgttagcggcggacgggtgagtaacacgtgggtaacctgcctgtaagactgggataactccgggaaaccggggctaataccggatggttgtctgaaccgcatggttcagacataaaaggtggcttcggctaccacttacagatggacccgcggcgcattagctagttggtgaggtaacggctcaccaaggcgacgatgcgtagccgacctgagagggtgatcggccacactgggactgagacacggcccagactcctacgggaggcagcagtagggaatcttccgcaatggacgaaagtctgacggagcaacgccgcgtgagtgatgaaggttttcggatcgtaaagctctgttgttagggaagaacaagtgccgttcaaatagggcggcaccttgacggtacctaaccagaaagccacggctaactacgtgccagcagccgcggtaatacgkaggtggcaagcgttgtccggaattattgggcgtaaagggctcgcaggcggtttcttaagkctgatgtgaaagcccccggctcaaccggggagggtcattggaaactggggaacttgagtgcagaagaggagagtggaattccacgtgtagcggkgaaatgcgtagagatgtggaggaacaccagtggcgaaggcgactctctggtctgtaactgacgctgaggagcgaaagcgtggggagcgaacaggattagataccctggtagtccacgccgtaaacgatgagtgctaagtgttagggggtttccgccccttagtgctgcagctaacgcattaagcactccgcctggggagtacggtcgcaagactgaaactcaaaggaattgacgggggcccgcmcaagcggtggagcatgtggtttaattcgaagcaacgcgaagaaccttaccaggtcttgacatcctctgacaatcctagagataggacgtccccttcgggggcagagtgacaggtggkgcatggttgtcgtcagctcgtgtcgtgagatgttgggttaagtcccgcaacgagcgcaacccttgatcttagttgccagcattcagttgggcactctaaggtgactgccggtgacaaaccggaggaaggtggggatgacgtcaaatcatcatgccccttatgacctgggctacacacgtgctacaatggacagaacaaagggcagcgaaaccgcgaggttaagccaatcccacaaatctgttctcagttcggatcgcagtctgcaactcgactgcgtgaagctggaatcgctagtaatcgcggatcagcatgccgcggtgaatacgttcccgggccttgtacacaccgcccgtcacaccacgagagtttgtaacacccgaagtcggtgaggtaaccttttaggagccagccgccgaaggtgggacagatgattggggtgaagtcgtaacaaggtagccgtatcggaaggtgcggctggatcacctcctttctaaggattttaacggaatataagaccttgggtcttataaacagaacgttccctgtcttgtttagttttgaaggatcattcgattcttcgagatgttgttctttgaaaactagataacagaagtaattcacattcaattagtaatgcaagatatcacgtagtgattctttttaacggttaagttagaaagggcgcacggtggatgccttggcactaggagccgatgaaggacgggacgaacaccgatatgcttcggggagctgtaagcaagctttgatccggagatttccgaatggggaaacccaccactcgtaatggagtggtatccatatctgaatacataggatatgagaaggcagacccggggaactgaaacatctaagtacccggaggaagagaaagcaaatgcgattccctgagtagcggcgagcgaaacgggaccagcccaaaccaagaggcttgcctcttggggttgtaggacactctgtacggagttacaaaggaacgaggtagatgaagaggtctggaaaggcccgccataggaggtaacagccctgtagtcaaaacttcgttctctcctgagtggatcctgagtacggcggaacacgtgaaattccgtcggaatccgggaggaccatctcccaaggctaaatactccctagtgaccgatagtgaaccagtaccgtgagggaaaggtgaaaagcaccccggaaggggagtgaaagagatcctgaaaccgtgtgcctacaagtagtcagagcccgttaacgggtgatggcgtgccttttgtagaatgaaccggcgagttacgatcccgtgcaaggttaagcagaagatgcggagccgcagcgaaagcgagtctgaatagggcgaattgagtacgtggtcgtagacccgaaaccaggtgatctacccatgtccagggtgaagttcaggtaacactgaatggaggcccgaacccacgcacgttgaaaagtgcggggatgaggtgtgggtaggggtgaaatgccaatcgaacctggagatagctggttctctccgaaatagctttagggctagcctcaaggtaagagtctcggaggtagagcactgattggactaggggcccctaccgggttaccgaattcagtcaaactccgaatgccgatgacttatccttgggagtcagactgcgagtgataagatccgtagtcgaaagggaaacagcccagaccgccagctaaggtcccaaagtatacgttaagtggaaaaggatgtggagttgcttagacaaccaggatgttggcttagaagcagccaccatttaaagagtgcgtaatagctcactggtcgagtgactctgcgccgaaaatgtaccggggctaaacgtatcaccgaagctgcggactgttcttcgaacagtggtaggagagcgttctaagggctgtgaagcaagaccggaaggacttgtggagcgcttagaagtgagaatgccggtatgagtagcgaaagaggggtgagaatcccctccaccgaatgcctaaggtttcctgaggaaggctcgtccgctcagggttagtcgggacctaagccgaggccgaaaggcgtaggcgatggataacaggttgatattcctgtaccacctcctcaccatttgagcaatggggggacgcaggaggatagggtaagcgcggtattggatatccgcgtccaagcagttaggctgggaaataggcaaatccgtttcccgtgaaggctgagctgtgatggcgagcgaattatagtagcgaagttcctgattccacactgccaagaaaagcctctagcgaggtgagaggtgcccgtaccgcaaaccgacacaggtaggcgaggagagaatcctaaggtgatcgagagaactctcgttaaggaactcggcaaaatgaccccgtaacttcgggagaaggggtgctctgttagggtgcaagcccgagagagccgcagtgaataggcccaggcgactgtttagcaaaaacacaggtctctgcgaagccgtaaggcgaagtataggggctgacgcctgcccggtgctggaaggttaagaggagcgcttagcgtaagcgaaggtgcgaattgaagccccagtaaacggcggccgtaactataacggtcctaaggtagcgaaattccttgtcgggtaagktccgacccgcacgaaaggcgcaacgatctgggcactgtctcaacgagagactcggtgaaattatagtacctgtgaagatgcaggttacccgcgacaggacggaaagaccccgtggagctttactgcagcctgatattgaatgttggtacagcttgtacaggataggtaggagccttggaaaccggagcgccagcttcggtggaggcatcggtgggatactaccctggctgtattgaccttctaacccgccgcccttatcgggcggggagacagtgtcaggtgggcagtttgactggggcggtcgcctcctaaaaggtaacggaggcgcccaaaggttccctcagaatggttggaaatcattcgcagagtgtaaaggcacaagggagcttgactgcgagacctacaagtcgagcagggacgaaagtcgggcttagtgatccggtggttccgcatggaagggccatcgctcaacggataaaagctaccccggggataacaggcttatctcccccaagagtccacatcgacggggaggtttggcacctcgatgtcggctcatcgcatcctggggctgtagtcggtcccaagggttgggctgttcgcccattaaagcggtacgcgagctgggttcagaacgtcgtgagacagttcggtccctatccgtcgcgggcgcaggaaatttgagaggagctgtccttagtacgagaggaccgggatggacgcaccgctggtgtaccagttgttctgccaagggcatcgctgggtagctatgtgcggacgggataagtgctgaaagcatctaagcatgaagcccccctcaagatgagatttcccattccgcaaggaagtaagatccctgaaagatgatcaggttgataggtctgaggtggaagtgtggcgacacatggagctgacagatactaatcgatcgaggacttaaccaatttgaatgtatgcttactgttatctagttttgagagaacactctcaatggtttggtggcgatagcgaagaggtcacacccgttcccatgccgaacacggaagttaagctcttcagcgccgatggtagtcgggggtttccccctgtgagagtaggacgccgccaagctatcttaacccagttcatgatgaactgggttttttatatgaaagatcacaatgtctgcatcaattcattgccaacttcttcagccatttctaaagctatttgtaaatgaaccaaggcttttttatggttattcaaatcatcgtagtttcctgcaataacaaaaagacatttgatcatatttactttgtatgtaggatgtttcttatatttatcataagacattttcacataatacatagaaacatgagtctgtttcatgtgataaaaaacctcggccatcttaaaataaaattccgctttttctatttcatcagtgactctggcaatcttagcttctgccttttgataatgattaatggctgctacataatccccgtttctaaattcgtacattcctctaaaaaaatgatcatagtatttcagcagcttcgttaacttctgcccggccccttcagattttcttaaatactcccaagtttccaactttttagaagaatctgacgggaaaagatagtccatcatcaaattatgtctaaaactgatcagctgataatacagtaataaatcttggtcctcttccatttcctcgatcattttttctacttctgctttgcacttttcagcgttttttgcatcaaatctgtttatatactcatgccaatcattaattttaacccccacagtagcagacggaatggcactcataaaactcgtccccctccagattaaccctttttatgaaaatggtagcacaagagaaggattgataactttgttgcggaaaattttcgacatgccgcaacgataaatttcccgagtaggaatctcattactacacaacaaatacttgaaataaaaaaacggaatcacatttggattccgcttaacacttacgattactacccccctgttagcataggaggggtattcggttggattcgatccggtcgctatcgctgccgctcggcgactgccgtcgccttacgctcccttctctcmccaactatttttcccgatcttttttctccttcaagagtaacttagtcccaattcmctagtcaagttcttgggctttgcccaaacccaccaacggatggccgttggatgccaatactcaatccccccaaccccccgaatcttcgggggactccctcgccggttggcgtcaaacaaacgggtttgtttgagtgctgaaagggttcgggtggcgctgaatgagtcaactccttaatcctccctacggtccggttaccgttgactcacgccaagagcgcctgctgcccatttagagataagacagctccagcgcttttcttatgtattcttcttctgtgatttctccatgaaaccgcctttttaaaagcttttcctcttctgccgtcagcactaagccctcaaagccaagggttgctcttacatatttcatccctgtttcaaaatcaatcttttgcattactaccccctcctctttatcaaamgcccctccgggtcatttccgccagtacgccccaatttatttggtgcgtataactgggcactccgtgaccgctcctaaattccaaaacaaactcaaacacaaaagaacccagtcagccccctgtcatgactggatttttcctctagtttaggtatgcagcgctccttttgaaatgcacccttttcaaaacaactcaaacataataaagggtgcaacacttgaaggtgtctggcctctccatagcgaacctattttacgaggtgattcgtgatggatatgggagtcaaattatcgtccaaagacgtcgcaaaacacctcggtatagagccggtgactgtccgcaagtatgccagtatgcttgaagaacaaggctactccttcaataaagattcaaaaggatggcgactctataccgaggatgacgtaaagactttagagtatctatgtacaatgactaagatcaatggacactcactcgacgaaacggtaaagcatatagcaagcctgtatcgttcaaaactgaccatatcggataccgctacatcgctacaggacaatcctttggttgaattcatgaagcgacaggaagaattcaacmaaaggatggcagaacggatggaacaattcgaaaaaagacagcaagaaaggcacgagacacycactgccgcattacgggagtcgctagagacacaaagaatgatcgcagccactaaacaaaaaaagtggtggcaattttggaagaacagctaataccgccaacagtcaccgctctaattcatggtccttgtatttattcgcttctctaggcattccagccgtacggaaaaacgatgccgctaatttccgcacccttggcaacttctctttagcccactgcaccattttgtctttccactgttccagtacggccacccgatctcttaacgtcttgttttcctcgttcagcgactgaaactctttattttgctcctgggcgaagttcagcagctcaccatmcctacctctttccgctttaaggctttttttcgtttcggcgtgctttttgacctcattgtctttttgttcgctcagagacaacgtcagccgcttcaaatccctattctccgttctcagctcgctgttttctgttttcagagcagacagctcttctttcacttcctgacggagttcttctcgttgctcttccgtaaattctttagtcagcttacgccgcatccccctttttgctttttcgacctcctcgttcataaccgtctgcagatccgagagcatcttatctttcgagtctgcccgctccctttcttcgacggctatggacttccaccgttccttctcttccgtttccgcttcaagttgccgcgacagttgcgccgccattttcccttgatcttccgcataagcatacaaattttcaagttcatgctgcggcacagtcaccttgtcttttttgaaaagaccggctttttcatactcaacggtcgggatcctctgctcttgcgttttagccgtcagcgcttcttttttgacggaaaccactgattcgaccgctcggttctgctgttccaattccgctttccgtttttccttcaaagcgatctcagcgttcagccgctcaagctccgctttccgctgattgattttgtactggtkaacattttcatgcttcttttcgcttggttctccccgctccaagtcaaaaccgctcttcaccatatgccggtgaaaatcatcctgaatagctttcatcttcagcttgccgttaaagaaatctttagcagaaagccggccgtcctcggtgatcggcacaatcccgacatgcatgtgcggggtcgcttcatccatatgtaccgtggcatacaacatattttccgcagtgtatttctctttcagatgatccactgccgcttcaaaatagcgccgctgctccgtctcgctcaatccgttcatgtagtcaggactggccgtaatcaaaaactcgctcactaaaacggcatcgtcccgcactttccgtttgaccctgccctcaattttttcacgaaccgcctgtgcgtagctgatcggttgaccgttaacaagatcataattgagatgcgaccggccacgatcaatgttttcatttttgcttttttgaaactcccgctgattgtgtttttgcgtcccattcagtctatctttcttgtatttttccatcctgataaccgcataatttgccacacgaaccccccccaatacataccactatattagggttatggtaacacaaaatttcagttttggtgtaacgcactacaccaaattgttcctacggattcaatttggacgtgcgacctgcggtgccggtggctctctcattctcgctatcgcatcgaaagttcatgccacttgtcggcaacatgccgmcccgatttttccgccgatgagagatcggcaggaaatcggaaaaccctttctgctcccgcagcatttaacacatgaacattttattctatgtactaaattttcatattttattatagccgcaaaatccgcaatcaaaaaaaggtcaaataggtatttggttactttttatttgaaaatatgtataattttgttgaaaaaaccatgatatatgatacggtttattggaactagaaaagtaaaaggagtgaaaaataagwaatgatccccaaaaaaaagagcaagaaatatttcctgctacaaacgtttcttttgtaaaaaaacagaatcccagaaccaataaattaaggccaacaaaaagctaaagacgtacagttcatacctaacaaaaacaataagaccataatcagtcaataaagccaaaaccgagcaaacaataaaagcagacaaaaaataaactaacaagtaacggatattaaacttttgtggctttctatgtaaaaaaagttgtataggtgtagcaaaaataaaataagcaacaaagataaaaagacttgtcacctgaaaataaccaaaaccaaaatctggwggagtaaacacaatcatataggcaaatgtagctgatataacggaaaggacaaccatacatacataaccaaaaatcctactcaaaatacgcatccaattaaactccttttcgctaaattaatttaatttcaatggaggggttccgcttgaagaagatttatattctatcattctttataattctgctttgtttatccgtaacaacaaatacttcacacgcaaaaaatttatccaatgatgttgaaacaaatgtaaaagatggtmacgtaacactaaaagtaaactatacaggcgatacatacaagtttttcaagaacggaaaatctatatacaccggttcgtctaatgagatcaatagtgatatttcaaaaattggagacaaatataaaatcggaatttatcaagaaaacactctaaaaaaagwgattacwctcaacgtaaccaatgatctgcaagaagaagccaataaaataacagwttcagcagaaacaaaagaagaatcatataatgaaaaactaatggactacaagattaaaaacagtcatataaatgttgtcgcaactactgacgacgtaaaactctcatggaaccaactccctgacgaagatgggatttatgaaatatacagagacgacaaaaaaataggcgagacaacagatttaaactttacagataaaaatgtaaaacctggtgaaagatataactattctattaatgtaagcgtaaaaccatcaaaagaacaacaagaaaaaatggagaaaaaattcgatgaactcggatcaactctctctgataaggaaaaagaagaggtcatgagtgtcgaaggttcattatcaacaattgttgatatgcctaaaaacgaagaatcatatttgaaatctaaaaagtctgtattaaacgaggtaacggataacggaaaactttctgcacaagggaagctcccaaaagataatatgcatggttgggcatatagaacttttattccttacaagtctgtagcagatcccaaaccagaatttaaaaagacatatctaaaaggtgacggtagagatttttccgctacttcaaataaattcagaacagaatcaagtgttaatacacaattcactggaccaacgagcattacaatgtacaaaaaagtatcacaatcagtaagatgtaaagatgcagcatgcactaaagttttagataaaaaaactgctagtaccgctggcatgaaactatatatcaatagcaaaaaaagtgattatcttcattggacagtaacacatgcaattggaattccattcggagcatactacccaaaaattgactacgattacaatgtaatgctgacaaaaggtatggcatctatatcaggaaaacatgataaagctccaaatcatgagttttatgtaagcgcaccatcctcatctaatgcgactacaatctacagatatgcagtcaaatcaaaaaaagattttgtagagctatggttcgccaaagctaagaaatcatggaaaacagaactattttaatcaaataaaaaaagcagaccatcaaccggtctgctttttatttgattatgtaatttttaatgcctggatgccagtaagccattacctcaaatgcttcgttcgccacctcgtcatcctcttcctcgatcttgacgagatcgccgtcctccgcatcaccaaggttcagctccttatgaatttccttcaaaatgccgccatagccaataagccggcgagcagaaagtgcatcatctaaataaaacaccgtgttcagattgtcttctgtcmccttgctgccacgcatcacatccgtatccttgactggatattttgaaatctccagaacggctttgtgctccatcatggcttcccgcacatcgctctcgatctgctcggcatcaatgttagcttttcctttaaccctacgtatgtcaacgatcggcgtgtaatccagtttcatcgcccttttccaaagacttgtccagtccgtctgtttgatgtaattctttcccgtgaaatagcttttctttacaggtaaaagcacatgaaaatgaggatgatatgtatcttcttcatgattttttgttatctctaaagctctaaaataaccaagaatcgctttatcaactcttttatatttcaccaaccgattgaatcccttcatcatgtcagagatcgcaggtttcagaccgtccccttcaacatttcggactgtcagcgtgagaaaaatccatctacagccgtactgacgattggcttcctcaacaatcaatttattatgataagcaatttttaacgacctgcgccaagcacacatcgggcataacctcactttgcaaaaatgggcttgatacagctttagtttatccgtctccggatctcttttaamcgaaagacactctgcacaaccattcagcttttcagccttcttgccatagtaaggtgctccaattttggtctgtaatgcttcgtaatgctccgccataagatttgcccgtctcttttttcctttccaatcccgctttttacctgttgcggtcttgtcctcaaggatgctataattatgttcaactgaattcaaacgaaacgaaactcctttctgtgctagtaatctagcgttctattatttttggtggtacttaaataatagcagaaggagttttgtactgtcaaaatacttctaaacccttgacagacaagggatgagcgtgattttttaaaatcttgttgtttctatatagtatcaagataagaaaagacccgatttcgactccgtcaaaatcgcaaaaaaggccggcagaattgccggtctttttttaaaacccaaaacctaagatcaaaaccattcttcccccatagggggagatttttcaaaaaatcggccctgcagccgcgcattattttagatattcaatatctttaaaaaaccgcacgtctccacatgaccaacacatgaacctccacacagtcaacacatggccttttctatcaacacgcagtcaacacatccagccatggtcaaatgcgtagcattatttatttcgccggtgcgaaaaaacgagcacctttcgataaggtgcgtaagtggacactccgctactcgctacttaaaaaaggtgaacagctaatctgcatacctaaaggcgtcctcagaatgctcagattcgtttctacgggcttcaaataaaaaacgcccccttttataaagggaacccaataaaacgccttaaaaggctttaaaacgattttttgcaataaaaaaaagcagactctaagagtccgccccatttaggccttaaattttccttatgttgcatttcgagaagcaactgaaatctccccatgagaaacagaataacctgcaccgccggctaacagacccaaaatgaggacagcagcaaaaagacttttaaatttcataatgagaatcactcctctgaatttgtctttgagcgcacaccatttcattgtaaaagtatatagaatcttccatgcgcctcttcttagtatagaattctgcagccactaaagctagctcttcaaagtatggatagcctttttcggtctttagtccgtacaatgcatcttttacattttgtctgttagcagtatcaataaataatgcttttagtacattcaacaatttcatgtaaaattcattttcgaacgcttcagcttcctttactgcctttttaaaaaagtccatcccctcgatcatttcaccgttctgaaagtgaataagggacaaatcgtaataagcctgaatgatttctttagcccccgccttttttgcaagcttaatggcttggtgatacaaaggaatagccattggactttgcaaacggttatagctattgcccatatttaaatatgcaaatgtctgcatcaattcattgccaacttcttcagccatttctaaagctatttgtaaatgaaccaaggcttttttatggttattcaaatcatcgtagtttcctgcaataacaaaaagacatttgatcatatttactttgtatgtaggatgtttcttatatttatcataagacattttcacataatacatagaaacatgagtctgtttcatgtgataaaaaacctcggccatcttaaaataaaattccgctttttctatttcatcagtgactctggcaatcttagcttctgccttttgataatgattaatggctgctacataatccccgtttctaaattcgtacattcctctaaaaaaatgatcatagtatttcagcagcttcgttaacttctgcccggccccttcagattttcttaaatactcccaagtttccaactttttagaagaatctgacgggaaaagatagtccatcatcaaattatgtctaaaactgatcagctgataatacagtaataaatcttggtcctcttccatttcctcgatcattttttctacttctgctttgcacttttcagcgttttttgcatcaaatctgtttatatactcatgccaatcattaattttaacccccacagtagcagacggaatggcactcataaaactcgtccccctccagattaaccctttttatgaaaatggtagcacaagagaaggattgataactttgttgcggaaaattttcgacatgccgcaacgataaatttcccgagtaggaatctcattactacacaacaaatacttgaaataaaaaaacggaatcacatttggattccgcttaacacttacgattactacccccctgttagcataggaggggtattcggttggattcgatccggtcgctatcgctgccgctcggcgactgccgtcgccttacgctcccttctctcaccaactatttttcccgatcttttttctccttcaagagtaacttagtcccaattcactagtcaagttcttgggctttgcccaaacccaccaacggatggccgttggatgccaatactcaatccccccaaccccccgaatcttcgggggactccctcgccggttggcgtcaaacaaacgggtttgtttgagtgctgaaagggttcgggtggcgctgaatgagtcaactccttaatcctccctacggtccggttaccgttgactcacgccaagagcgcctgctgcccatttagagataagacagctccagcgcttttcttatgtattctcaagccgtaaaatcccaataaccaaaaaaagaaccctgcagcgcgggactgaccccataatatgagacaaacaaaaaacaccttcaagtttgaaaacggatcgttgttatccgaaattagacttggaggtgttttttctatggggacaagagtgagttatccggttgaagcgaaacagaaggctgtagaaatgagattggcaggcgtacctatgaaagagatcatgcaggagttgaatattaagaataagacacaggttcagacatgggttagatggtataaggctggtgatacacatcgattcgaacagcctgttggaaagcaatacacttacggaaaaggtccggagtattcttccgatttagagaaactgcaggcagagattcgttacctgagacaacagaatgaagttttaaaaaagtacaacgaattggaaaggaagttgatagcgaaacgtcagtcgaacttgtagaaatattgcacagcacaatgaccgtacaggatatctgtattcatttaggtatctctcgagcgtcttattatcgttggaagaagaatctgatgaaggatcatcccaagcgccatttggaaaaacaaatcggcacgttgtgccgagagcacaagtatcgatatggatatcgaaaaatcacagccatactaaaaaagagaatgtgtattaaccataaaacggttcagcgcattatgcagaaaaatcaatggcagtgtcgggttaaggtgaaaaagcgcaagaaggatgggcagccatatgccgtggtcgataatatattggatcggaactttcagtctgatcgtcctctggaaaagctagtaacggatatcacatatttgccttatgggcagaaacaattgtatctttccagtatattggatttatacaatggagaagtgattgcttttacgattggcgatagacaggacacagactttgtcttacacacacttgatcagctgcccgcactgccagagaactgtgtgttacatagtgaccaaggttctgtttatacatcttatgagtatcagaaagctgttaaaacaaaaggcattaccatgagcatgtcccgcaaagggacgcccgctgataatgcctccatcgaatcgtttcattcctcactaaagtctgaaacgttctacctcgacaggttggaaagcactacgacgaccatcgtagaacaaactgtcgaaacctatatacactattataacaacattcgtattcaaacgaaactaaacaaccagccgccggtcacataccgacagctggctgcttaaaggtgttttgatccctgtctcaaaaacgggggtcagtcccgcgcaagggttcttttttcatttatacttcaatagcgaaacgtcagtcgaacttgtagaaatattgcacagcacaatgaccgtacaggatatctgtattcatttaggtatctctcgagcgtcttattatcgttggaagaagaatctgatgaaggatcatcccaagcgccatttggaaaaacaaatcggcacgttgtgccgagagcacaagtatcgatatggatatcgaaaaatcacagccatactaaaaaagagaatgtgtattaaccataaaacggttcaacgtattatgcagaaaaatcaatggcagtgtcgggttaaggtgaaaaagcgcaagaaggatgggcagccatatgccgtggtcgataatatattggatcggaactttcagtctgatcgtcctcttgaaaaactagtaacggacatcacatatttgccttatggacagaaacaattgtacctttccagtatattagatttatacaatggagaagtgattgcttttactattggggataagcaggacacagcctttgtcttagacacacttgatcagctaccaatgctgcctgagaactgcgtgttacatagtgaccaaggttctgtgtatacatcttacgagtatcaaaaagctgttaaaacaaaaggcattaccatgagcatgtcccgcaaagggacgcccgctgataatgcctccatcgaatcgtttcattcctcgctaaagtctgaaacgttctatcttaacagcattgatcgaactacgactgccatcgtagaacgcactgtcatagaatacattcattattataacaatattcgtattcaaaccaaactaaacaaccaatcaccgataaactatcggcaattggctgtttaaaaggtgttttgacccctgtctcaaaaacggggggcagtcccctagtcatcctactttttatcttcttccaagtagtataaataaccatctcatataatcactacattatgaaaacgtaattctgaattatactttattatgattttttcttttaaacataggaaactgcaccaataaatttaaatgaatagttttttgcagttatttctttctccctgccgtcatattcaaaattatataaaagaacagcagcattgatttgatcagggagtgtggtacctactatgtcttcgaactcagttcggatcgcagtctgcaactcgactgcgtgaagctggaatcgctagtaatcgcggatcagcatgccgcggtgaatacgttcccgggccttgtacacaccgcccgtcacaccacgagagtttgtaacacccgaagtcggtgaggtaaccttttaggagccagccgccgaaggtgggacagatgattggggtgaagtcgtaacaaggtagccgtatcggaaggtgcggctggatcacctcctttctaaggattttaacggaatataagaccttgggtcttataaacagaacgttccctgtcttgtttagttttgaaggatcattccttcaaaacataggaacacctgctaaatgcgccacttcctgtggcaacgcatgtgttagcatgtcctatgcgttgttctttgaaaactagataacagaagtaattcacattcaattagtaatgcaagatatcacgtagtgattctttttaacggttaagttagaaagggcgcacggtggatgccttggcactaggagccgatgaaggacgggacgaacaccgatatgcttcggggagctgtaagcaagctttgatccggagatttccgaatggggaaacccaccactcgtaatggagtggtatccatatctgaatacataggatatgagaaggcagacccggggaactgaaacatctaagtacccggaggaagagaaagcaaatgcgattccctgagtagcggcgagcgaaacgggatcagcccaaaccaagaggcttgcctcttggggttga

SEQ ID NO: 2 - protein, 571 aa, Bacillus subtilis
VLAKATNELKTSGKNRGAELVVDCLVEQGVTHVFGIPGAKIDAVFDALKDKGPELVLCRHEQNAAFMAAAVGRLTGKPGVCLVTSGPGASNLATGLLTANTEGDPVVALAGNVIRADRLKRTHQSLDNAALFQPITKYSVEVQETGNIPEAVTNAFKAASAGQAGAAFVSFPQDVVNEITNVKNVRSVPAPKQGPAPEEAVSAAIAKIQTAKLPVLLVGMKGGRPEAVKQIRKLLAKTKLPFVETYQGAGTLSRELEDQYFGRIGLFRNQPGDLLLEQADVVLTIGYDPIEYDPKFWNVNGDRAIIHLDEIQADIDHAYQPELELLGDIAATVKQIEHDAVTFDMGSREQEVLSELKQMLTDSEKAPSDHKSDRVHPLQIVQELRNAIDDDVTVTCDIGSHAIWMSRYFRAYEPLKLLISNGMQTLGVALPWAIAATLVNPGEKVVSVSGDGGFLFSAMELETAVRLKAPIVHLVWNDSTYDMVAFQQMKKYNRTSCVDFGNIDIVKYAESFGATGLRVESPEQLADVLQKGLNTEGPVIIDIPVDYSDNVHLSSDMLPKQFKEKMKAKAL

SEQ ID NO: 3 - protein, 571 aa, Bacillus subtilis
VLAKATNELKTSGKNRGAELVVDCLVEQGVTHVFGIPGAKIDAVFDALKDKGPELVLCRHEQNAAFMAAAVGRLTGKPGVCLVTSGPGASNLATGLLTANTEGDPVVALAGNVIRADRLKRTHQSLDNAALFQPITKYSVEVQETGNIPEAVTNAFRAASAGQAGAAFVSFPQDVVNEITNVKNVRSVPAPKQGPAPEEAVSAAIAKIQTAKLPVLLVGMKGGRPEAVKQIRKLLAKTKLPFVETYQGAGTLSRELEDQYFGRIGLFRNQPGDLLLEQADVVLTIGYDPIEYDPKFWNVNGDRAIIHLDEIQADIDHAYQPELELLGDIAATVKQIEHDAVTFDMGSREQEVLSELKQMLTDSEKAPSDHKSDRVHPLQIVQELRNAIDDDVTVTCDIGSHAIWMSRYFRAYEPLKLLISNGMQTLGVALPWAIAATLVNPGEKVVFVSGDGGFLFSAMELETAVRLKAPIVHLVWNDSTYDMVAFQQMKKYNRTSCVDFGNIDIVKYAESFGATGLRVESPEQLADVLQKGLNTEGPVIIDIPVDYSDNVHLSSDMLPKQFKEKMKAKAL

SEQ ID NO: 4 - protein, 571 aa, Bacillus subtilis
VLAKATNELKTSGKNRGAELVVDCLVEQGVTHVFGIPGAKIDAVFDALKDKGPELVLCRHEQNAAFMAAAVGRLTGKPGVCLVTSGPGASNLATGLLTANTEGDPVVALAGNVIRADRLKRTHQSLDNAALFQPITKYSVEVQETGNIPEAVTNAFRAASAGQAGAAFVSFPQDVVNEITNVKNVRSVPAPKQGPAPEEAVSAAIAKIQTAKLPVLLVGMKGGRPEAVKQIRKLLAKTKLPFVETYQGAGTLSRELEDQYFGRIGLFRNQPGDLLLEQADVVLTIGYDPIEYDPKFWNVNGDRAIIHLDEIQADIDHAYQPELELLGDIAATVKQIEHDAVTFDMGSREQEVLSELKQMLTDSEKAPSDHKSDRVHPLQIVQELRNAIDDDVTVTCDIGSHAIWMSRYFRAYEPLKLLISNGMQTLGVALPWAIAATLVNPGEKVVSVSGDGGFLFSAMELETAVRLKAPIVHLVWNDSTYDMVAFQQMKKYNRTSCVDFGNIDIVKYAESFGATGLRVESPEQLADVLQKGLNTEGPVIIDIPVDYSDNVHLSSDMLPKQFKEKMKAKAL

SEQ ID NO: 5 - protein, 323 aa, Bacillus subtilis
VADLFTKVQEKVAGKDVKIVFPEGLDERILVAVNNLAGNKVLKPIVVGNKEDIQAKAKELNLTLDGVDIFDPHTYEGMEELVQAFVERRKGKATEEQARKALLDENYFGTMLVYKGLADGLVSGAAHSTADTVRPALQIIKTKEGVKKTSGVFIMARGDEQYVFADCAINIAPDSQDLAEIAIESANTAQMFDIDSRVAMLSFSTKGSAKSDETDKVAEAVKIAKEKAPELTLDGEFQFDAAFVPSVAEKKAPDSDIKGDANVFVFPSLEAGNIGYKIAQRLGGFEAVGPILQGLNMPVNDLSRGCNAEDVYNLALITAAQAL

SEQ ID NO: 6 - protein, 323 aa, Bacillus subtilis
VADLFTKVQEKVAGKDVKIVFPEGLDERILVAVNNLAGNKVLKPIVVGNKEDIQAKAKELNLTLDGVDIFDPHTYEGMEELVQAFVERRKGKATEEQARKALLDENYFGTMLVYKGLADGLVSGAAHSTADTVRPALQIIKTKEGVKKTSGVFIMARGDEQYVFADCAINIAPDSQDLAEIAIESANTAQMFDIDPRVAMLSFSTKGSAKSDETDKVAEAVKIAKEKAPELTLDGEFQFDAAFVPSVAEKKAPDSDIKGDANVFVFPSLEAGNIGYKIAQRLGGFEAVGPILQGLNMPVNDLSRGCNAEDVYNLALITAAQAL

SEQ ID NO: 7 - protein, 346 aa, Bacillus subtilis
MKAARWHNQKDIRIENIDEPKAEPGKVKIKVKWCGICGSDLHEYLGGPIFIPVGKPHPLTNEMAPVTMGHEFSGEVVEVGEGVKNYSVGDRVVVEPIFATHGHQRAYNLDEQMGFLGLAGGGGGFSEYVSVDEELLFKLPEELSYEQGALVEPSAVALYAVRQSKLKAGDKAAVFGCGPIGLLVIEALKAAGATDIYAVELSPERQEKAKELGAIIIDPSKTDDVVEEIAKRTNGGVDVSYEVTGVPVVLRQAIQSTNIAGETVIVSIWEKGAEIHPNDIVIKERTVKGIIGYRDIFPSVLALMKEGYFSADKLVTKKIVLDDLIEEGFGALIKEKNQVKILVKPN

SEQ ID NO: 8 - protein, 346 aa, Bacillus subtilis
MKAARWHNQKDIRIENIDEPKAEPGKVKIKVKWCGICGSDLHEYLGGPIFIPVGKPHPLTNEMAPVTMGHEFSGEVVEVGEGVKNYSVGDRVVVEPIFATHGHQGAYNLDEQMGFLGLAGGGGGFSEYVSVDEELLFKLPEELSYEQGALVEPSAVALYAVRQSKLKAGDKAAVFGCGPIGLLVIEALKAAGATDIYAVELSPERQEKAKELGAIIIDPSKTDDVVEEIAKRTNGGVDVSYEVTGVPVVLRQAIQSTNIAGETVIVSIWEKGAEIHPNDIVIKERTVKGIIGYRDIFPSVLALMKEGYFSADKLVTKKIVLDDLIEEGFGALIKEKNQVKILVKPN

SEQ ID NO: 9 - protein, 349 aa, Bacillus subtilis
MCNNHPTRVLSAPHAKAKFERTTIERRALRPHDILIDIKYSGICHSDIHSAFDEWGGGIFPMVPGHEIAGVVEAVGEEVTTFAVGDRVGVGCFVDSCGECEYCLNGDEQYCTKGVVQTYNNLDYDGNPTYGGYSQKIVVTDRFVVRIPDQLELDAASPLLCAGITTYSPLKHWNAGPGKKVAIVGMGGLGHLAVQFAHALGAEVTVLSRSMNKKDEALEFGADHYFATSDPDTFTELAGRFDLILNTVSANLDVDAYLSLLRIDGTLVNVGAPAKPDSYSVFSLITGRRSIASSLVGGIPQTQEMLDFAAEHGIAPKIEVIPANQVDEAYERVLQSDVRYRFVIDISTL

SEQ ID NO: 10 - protein, 349 aa, Bacillus subtilis
MCNNHPTRVLSAPHAKAKFERTTIERRALRPHDILIDIKYSGICHSDIHSAFDEWGGGIFPMVPGHEIAGVVEAVGEEVTTFAVGDRVGVGCFVDSCGECEYCLNGDEQYCTKGVVQTYNNLDYDGNPTYGGYSQKIVVTDRFVVRIPDQLELDAASPLLCAGITTYSPLKHWNAGPGKKVAIVGMGGLGHLAVQFAHALGAEVTVLSRSMNKKDEALEFGADHYFATSDPDTFTELAGRFDLILNTVSANLDVDAYLSLLRIDGTLVNVGAPAKPDSYSVFSLITGRRSIAGSLVGGIPQTQEMLDFAAEHGIAPKIEVIPANQVDEAYERVLQSDVRYRFVIDISTL

SEQ ID NO: 11 - protein, 130 aa, Bacillus subtilis
LNNVAAKNETLTVRGAELVVDSLIQQGVTHVFGIPGAKIDAVFDVLKDKGPELIVCRHEQNAAFMAAAVGRLTGKPGVCLVTSGPGASNLATGLVTANTEGDPVVALAGAVKRADRLKKTHQSMDNAALF

SEQ ID NO: 12 - protein, 572 aa, Bacillus licheniformis
LNNVAAKNETLTVRGAELVVDSLIQQGVTHVFGIPGAKIDAVFDVLKDKGPELIVCRHEQNAAFMAAAVGRLTGKPGVCLVTSGPGASNLATGLVTANTEGDPVVALAGAVKRADRLKKTHQSMDNAALFQPITKYSAEVEDANNIPEAVTNAFRAAASGQAGAAFLSFPQDVTAGPATAKPVKTMPAPKLGAASDEQISAAIAKIHNANLPVVLVGMKGGRPEAIEAVRRLLRKVKLPFVETYQAAGTLSHDLEDQYFGRIGLFRNQPGDMLLEKADVVLTVGYDPIEYDPVFWNGKGERSVIHLDEIQADIDHDYQPEIELIGDIAETLNHIEHDSLPVSIDESFAPVLDYLKKALEEQSEPPKETKTDLVHPLQIVRDLRELLSDDITVTCDIGSHAIWMSRYFRTYRPHGLLISNGMQTLGVALPWAIAATLVNPGQKVVSVSGDGGFLFSAMELETAVRLKAPIVHIVWNDSTYDMVAFQQEMKYKRTSGVDFGGIDIVKYAESFGAKGLRVNSPDELAEVLKAGLDAEGPVVIDIPVDYSDNIHLADQRFPKKFEEHFNKEASKQS

SEQ ID NO: 13 - protein, 256 aa, Bacillus subtilis
VKGKVALVTGASQGIGKEVALALAGRGVFVAAADQNRKGLLELEDELEQKGLQGSGFAADMGDSAAVDQLIADIEREIGPIDMLVNVAGVLRTGLIHSLSDEDWEKTFNVNSTGVFNVSRAVARRMVPRRTGAIVTVGSNAAAVPRMHMAAYAASKAAALMFTKCLGLELAEYNIRCNIISPGSTDTPMQRSLWQCEEAAQGVIEGSLETFKTGIPLGKLASPADIADAVVFLLSDGARHITMHDLRVDGGATLGA

SEQ ID NO: 14 - protein, 245 aa, Bacillus licheniformis
VKGKVALVTGASQGIGKEVALALAGRGVFVAAADQNRKGLLELEDELEQKGLQGSGFAADVGDSAAVDQLIADIEREIGPIDMLVNVAGVLRTGLIHSLSDEDWEKTFNVNSTGVFNVSRAVARRMVPRRTGAIVTVGSNAAAVPRMHMAAYAASKAAALMFTKCLGLELAEYNIRCNIISPGSTDTPMQRSLWQCEEAAQGVIEGSLETFKTGIPLGKLASPADIADAVVFLLSDGARHITMHD

SEQ ID NO: 15 - DNA, 1575 bp, Bacillus subtilis
gtcagtcaaactactttatcggagagtttgatcctggctcaggacgaacgctggcggcgtgcctaatacatgcaagtcgagcggacagatgggagcttgctccctgatgttagcggcggacgggtgagtaacacgtgggtaacctgcctgtaagactgggataactccgggaaaccggggctaataccggatggttgtytgaaccgcatggttcagacataaaaggtggcttcggctaccacttacagatggacccgcggcgcattagctagttggtgaggtaacggctcaccaaggcgacgatgcgtagccgacctgagagggtgatcggccacactgggactgagacacggcccagactcctacgggaggcagcagtagggaatcttccgcaatggacgaaagtctgacggagcaacgccgcgtgagtgatgaaggttttcggatcgtaaagctctgttgttagggaagaacaagtgccgttcaaatagggcggcaccttgacggtacctaaccagaaagccacggctaactacgtgccagcagccgcggtaatacgkaggtggcaagcgttgtccggaattattgggcgtaaagggctcgcaggcggtttcttaagkctgatgtgaaagcccccggctcaaccggggagggtcattggaaactggggaacttgagtgcagaagaggagagtggaattccacgtgtagcggkgaaatgcgtagagatgtggaggaacaccagtggcgaaggcgactctctggtctgtaactgacgctgaggagcgaaagcgtggggagcgaacaggattagataccctggtagtccacgccgtaaacgatgagtgctaagtgttagggggtttccgccccttagtgctgcagctaacgcattaagcactccgcctggggagtacggtcgcaagactgaaactcaaaggaattgacgggggcccgcmcaagcggtggagcatgtggtttaattcgaagcaacgcgaagaaccttaccaggtcttgacatcctctgacaatcctagagataggacgtccccttcgggggcagagtgacaggtggkgcatggttgtcgtcagctcgtgtcgtgagatgttgggttaagtcccgcaacgagcgcaacccttgatcttagttgccagcattcagttgggcactctaaggtgactgccggtgacaaaccggaggaaggtggggatgacgtcaaatcatcatgccccttatgacctgggctacacacgtgctacaatggacagaacaaagggcagcgaaaccgcgaggttaagccaatcccacaaatctgttctcagttcggatcgcagtctgcaactcgactgcgtgaagctggaatcgctagtaatcgcggatcagcatgccgcggtgaatacgttcccgggccttgtacacaccgcccgtcacaccacgagagtttgtaacacccgaagtcggtgaggtaaccttttaggagccagccgccgaaggtgggacagatgattggggtgaagtcgtaacaaggtagccgtatcggaaggkgcggctggatcacctcctttctaaggattt
